United States Patent Application Publication US 2025/0041412 A1 - sequence listing, part 3

SEQ ID NO: 16229 - protein, 35 aa, Artificial Sequence
  Synthetic polypeptide
VWGKECWTEPGDRPGTAFYFVRSWSVTFVSRGSAS

SEQ ID NO: 16230 - protein, 28 aa, Artificial Sequence
  Synthetic polypeptide
YGGKSAGQNQETVLALPSTLCEAGPLHL

SEQ ID NO: 16231 - protein, 757 aa, Artificial Sequence
  Synthetic polypeptide
FYIMEIPRDLTLDALLEMNEAKVKETLRRCGASGDECGRLQYALTCLRKVTGLGGEHKEDSSWSSLDARRESGSGPSTDTLSAASLPWPPGSSQLGRAGNSAQGPRSISVSALPASDSPTPSFSEGLSDTCIPLHASGRLTPRALHSFITPPTTPQLRRHTKLKPPRTPPPPSRKVFQLLPSFPTLTRSKSHESQLGNRIDDVSSMRFDLSHGSPQMVRRDIGLSVTHRFSTKSWLSQVCHVCQKSMIFGVKCKHCRLKCHNKCTKEAPACRISFLPLTRLRRTESVPSDINNPVDRAAEPHFGTLPKALTKKEHPPAMNHLDSSSNPSSTTSSTPSSPAPFPTSSNPSSATTPPNPSPGQRDSRFNFPAAYFIHHRQQFIFPDISAFAHAAPLPEAADGTRLDDQPKADVLEAHEAEAEEPEAGKSEAEDDEDEVDDLPSSRRPWRGPISRKASQTSVYLQEWDIPFEQVELGEPIGQGRWGRVHRGRWHGEVAIRLLEMDGHNQDHLKLFKKEVMNYRQTRHENVVLFMGACMNPPHLAIITSFCKGRTLHSFVRDPKTSLDINKTRQIAQEIIKGMGYLHAKGIVHKDLKSKNVFYDNGKVVITDFGLFGISGVVREGRRENQLKLSHDWLCYLAPEIVREMTPGKDEDQLPFSKAADVYAFGTVWYELQARDWPLKNQAAEASIWQIGSGEGMKRVLTSVSLGKEVSEILSACWAFDLQERPSFSLLMDMLEKLPKLNRRLSHPGHFWKSAEL

SEQ ID NO: 16232 - protein, 803 aa, Artificial Sequence
  Synthetic polypeptide
FYIMEIPRDLTLDALLEMNEAKVKETLRRCGASGDECGRLQYALTCLRKVTGLGGEHKEDSSWSSLDARRESGSGPSTDTLSAASLPWPPGSSQLGRAGNSAQGPRSISVSALPASDSPTPSFSEGLSDTCIPLHASGRLTPRALHSFITPPTTPQLRRHTKLKPPRTPPPPSRKVFQLLPSFPTLTRSKSHESQLGNRIDDVSSMRFDLSHGSPQMVRRDIGLSVTHRFSTKSWLSQVCHVCQKSMIFGVKCKHCRLKCHNKCTKEAPACRISFLPLTRLRRTESVPSDINNPVDRAAEPHFGTLPKALTKKEHPPAMNHLDSSSNPSSTTSSTPSSPAPFPTSSNPSSATTPPNPSPGQRDSRFNFPAAYFIHHRQQFIFPVPSAGHCWKCLLIAESLKENAFNISAFAHAAPLPEAADGTRLDDQPKADVLEAHEAEAEEPEAGKSEAEDDEDEVDDLPSSRRPWRGPISRKASQTSVYLQEWDIPFEQVELGEPIGQGRWGRVHRGRWHGEVAIRLLEMDGHNQDHLKLFKKEVMNYRQTRHENVVLFMGACMNPPHLAIITSFCKGRTLHSFVRDPKTSLDINKTRQIAQEIIKGMGYLHAKGIVHKDLKSKNVFYDNGKVVITDFGLFGISGVVREGRRENQLKLSHDWLCYLAPEIVREMTPGKDEDQLPFSKAADVYAFGTVWYELQARDWPLKNQAAEASIWQIGSGEGMKRVLTSVSLGKEVSEILSACWAFDLQERPSFSLLMDMLEKLPKLNRRLSHPGHFWKSADINSSKVVPRFERFGLGVLESSNPKM

SEQ ID NO: 16233 - protein, 28 aa, Artificial Sequence
  Synthetic polypeptide
LQENKLRALTDSTLWRSPETSRWMPCWR

SEQ ID NO: 16234 - protein, 43 aa, Artificial Sequence
  Synthetic polypeptide
SVTVSHHPQIGLSSCRKTSSGLSLILHYGDPPRPHAGCPAGDE

SEQ ID NO: 16235 - protein, 770 aa, Artificial Sequence
  Synthetic polypeptide
KILPATFFTVWPSDLVQEIPRDLTLDALLEMNEAKVKETLRRCGASGDECGRLQYALTCLRKVTGLGGEHKEDSSWSSLDARRESGSGPSTDTLSAASLPWPPGSSQLGRAGNSAQGPRSISVSALPASDSPTPSFSEGLSDTCIPLHASGRLTPRALHSFITPPTTPQLRRHTKLKPPRTPPPPSRKVFQLLPSFPTLTRSKSHESQLGNRIDDVSSMRFDLSHGSPQMVRRDIGLSVTHRFSTKSWLSQVCHVCQKSMIFGVKCKHCRLKCHNKCTKEAPACRISFLPLTRLRRTESVPSDINNPVDRAAEPHFGTLPKALTKKEHPPAMNHLDSSSNPSSTTSSTPSSPAPFPTSSNPSSATTPPNPSPGQRDSRFNFPAAYFIHHRQQFIFPDISAFAHAAPLPEAADGTRLDDQPKADVLEAHEAEAEEPEAGKSEAEDDEDEVDDLPSSRRPWRGPISRKASQTSVYLQEWDIPFEQVELGEPIGQGRWGRVHRGRWHGEVAIRLLEMDGHNQDHLKLFKKEVMNYRQTRHENVVLFMGACMNPPHLAIITSFCKGRTLHSFVRDPKTSLDINKTRQIAQEIIKGMGYLHAKGIVHKDLKSKNVFYDNGKVVITDFGLFGISGVVREGRRENQLKLSHDWLCYLAPEIVREMTPGKDEDQLPFSKAADVYAFGTVWYELQARDWPLKNQAAEASIWQIGSGEGMKRVLTSVSLGKEVSEILSACWAFDLQERPSFSLLMDMLEKLPKLNRRLSHPGHFWKSAEL

SEQ ID NO: 16236 - protein, 816 aa, Artificial Sequence
  Synthetic polypeptide
KILPATFFTVWPSDLVQEIPRDLTLDALLEMNEAKVKETLRRCGASGDECGRLQYALTCLRKVTGLGGEHKEDSSWSSLDARRESGSGPSTDTLSAASLPWPPGSSQLGRAGNSAQGPRSISVSALPASDSPTPSFSEGLSDTCIPLHASGRLTPRALHSFITPPTTPQLRRHTKLKPPRTPPPPSRKVFQLLPSFPTLTRSKSHESQLGNRIDDVSSMRFDLSHGSPQMVRRDIGLSVTHRFSTKSWLSQVCHVCQKSMIFGVKCKHCRLKCHNKCTKEAPACRISFLPLTRLRRTESVPSDINNPVDRAAEPHFGTLPKALTKKEHPPAMNHLDSSSNPSSTTSSTPSSPAPFPTSSNPSSATTPPNPSPGQRDSRFNFPAAYFIHHRQQFIFPVPSAGHCWKCLLIAESLKENAFNISAFAHAAPLPEAADGTRLDDQPKADVLEAHEAEAEEPEAGKSEAEDDEDEVDDLPSSRRPWRGPISRKASQTSVYLQEWDIPFEQVELGEPIGQGRWGRVHRGRWHGEVAIRLLEMDGHNQDHLKLFKKEVMNYRQTRHENVVLFMGACMNPPHLAIITSFCKGRTLHSFVRDPKTSLDINKTRQIAQEIIKGMGYLHAKGIVHKDLKSKNVFYDNGKVVITDFGLFGISGVVREGRRENQLKLSHDWLCYLAPEIVREMTPGKDEDQLPFSKAADVYAFGTVWYELQARDWPLKNQAAEASIWQIGSGEGMKRVLTSVSLGKEVSEILSACWAFDLQERPSFSLLMDMLEKLPKLNRRLSHPGHFWKSADINSSKVVPRFERFGLGVLESSNPKM

SEQ ID NO: 16237 - protein, 31 aa, Artificial Sequence
  Synthetic polypeptide
LKFCLPLSSPYGLVTSCRRSPETSRWMPCWR

SEQ ID NO: 16238 - protein, 18 aa, Artificial Sequence
  Synthetic polypeptide
PRAGDPPRPHAGCPAGDE

SEQ ID NO: 16239 - protein, 46 aa, Artificial Sequence
  Synthetic polypeptide
DQPGQHGHGCLLLRHLLEQLCRWGCLNTTGGSQQHLPHHSHDDENQ

SEQ ID NO: 16240 - protein, 44 aa, Artificial Sequence
  Synthetic polypeptide
FQHFGEAEAGGSPEVRSLRPTWPTWPWVPSSPASFGAALSVGVS

SEQ ID NO: 16241 - protein, 109 aa, Artificial Sequence
  Synthetic polypeptide
GQEFETNLANMAMGAFFSGIFWSSFVGGGVLTLLVEVSNIFLTIRMMMKISNAQDHLLYRVNKYVNLVMYFLFRLAPQAYLTHFFLRYVNQRTLGTFLLGILLMLDVMI

SEQ ID NO: 16242 - protein, 138 aa, Artificial Sequence
  Synthetic polypeptide
GQEFETNLANMAMGAFFSGIFWSSFVGGGVLTLLVEVSNIFLTIRMMMKISNAQDHLLYRVNKYVNLVMYFLFRLAPQAYLTHFFLRYVNQRTLGTFLLGILLMLDVMIIIYFSRLLRSDFCPEHVPKKQHKDKFLTE

SEQ ID NO: 16243 - protein, 132 aa, Artificial Sequence
  Synthetic polypeptide
DQPGQHGYFIHDTVDIVASGQTRASWEYLVHHVMAMGAFFSGIFWSSFVGGGVLTLLVEVSNIFLTIRMMMKISNAQDHLLYRVNKYVNLVMYFLFRLAPQAYLTHFFLRYVNQRTLGTFLLGILLMLDVMI

SEQ ID NO: 16244 - protein, 161 aa, Artificial Sequence
  Synthetic polypeptide
DQPGQHGYFIHDTVDIVASGQTRASWEYLVHHVMAMGAFFSGIFWSSFVGGGVLTLLVEVSNIFLTIRMMMKISNAQDHLLYRVNKYVNLVMYFLFRLAPQAYLTHFFLRYVNQRTLGTFLLGILLMLDVMIIIYFSRLLRSDFCPEHVPKKQHKDKFLTE

SEQ ID NO: 16245 - protein, 36 aa, Artificial Sequence
  Synthetic polypeptide
FQHFGEAEAGGSPEVRSLRPTWPTWVFHPRYGGHRG

SEQ ID NO: 16246 - protein, 58 aa, Artificial Sequence
  Synthetic polypeptide
GQEFETNLANMGISSTIRWTSWLADRREPLGNTLSITSWPWVPSSPASFGAALSVGVS

SEQ ID NO: 16247 - protein, 52 aa, Artificial Sequence
  Synthetic polypeptide
GGCCGSDYKQYVFGGWAWAWWCISDTQRDPDSGADLSGPGPVCQAGAGGGSP

SEQ ID NO: 16248 - protein, 412 aa, Artificial Sequence
  Synthetic polypeptide
GGCCGSDYKQYVFGGWAWAWWCISDTQRISLEIMTLQPRCEDVETAEGVALTVTGVAQVKIMTEKELLAVACEQFLGKNVQDIKNVVLQTLEGHLRSILGTLTVEQIYQDRDQFAKLVREVAAPDVGRMGIEILSFTIKDVYDKVDYLSSLGKTQTAVVQRDADIGVAEAERDAGIREAECKKEMLDVKFMADTKIADSKRAFELQKSAFSEEVNIKTAEAQLAYELQGAREQQKIRQEEIEIEVVQRKKQIAVEAQEILRTDKELIATVRRPAEAEAHRIQQIAEGEKVKQVLLAQAEAEKIRKIGEAEAAVIEAMGKAEAERMKLKAEAYQKYGDAAKMALVLEALPQIAAKIAAPLTKVDEIVVLSGDNSKVTSEVNRLLAELPASVHALTGVDLSKIPLIKKATGVQV

SEQ ID NO: 16249 - protein, 102 aa, Artificial Sequence
  Synthetic polypeptide
GGCCGSDYKQYVFGGWAWAWWCISDTQRLSLEVMTILCRCENIETSEGVPLFVTGVAQDFPRDYDVAAPLRGRRDGRGGSFNCDGCRPGEDHDGEGTPGRGL

SEQ ID NO: 16250 - protein, 412 aa, Artificial Sequence
  Synthetic polypeptide
GGCCGSDYKQYVFGGWAWAWWCISDTQRLSLEVMTILCRCENIETSEGVPLFVTGVAQVKIMTEKELLAVACEQFLGKNVQDIKNVVLQTLEGHLRSILGTLTVEQIYQDRDQFAKLVREVAAPDVGRMGIEILSFTIKDVYDKVDYLSSLGKTQTAVVQRDADIGVAEAERDAGIREAECKKEMLDVKFMADTKIADSKRAFELQKSAFSEEVNIKTAEAQLAYELQGAREQQKIRQEEIEIEVVQRKKQIAVEAQEILRTDKELIATVRRPAEAEAHRIQQIAEGEKVKQVLLAQAEAEKIRKIGEAEAAVIEAMGKAEAERMKLKAEAYQKYGDAAKMALVLEALPQIAAKIAAPLTKVDEIVVLSGDNSKVTSEVNRLLAELPASVHALTGVDLSKIPLIKKATGVQV

SEQ ID NO: 16251 - protein, 467 aa, Artificial Sequence
  Synthetic polypeptide
GGCCGSDYKQYVFGGWAWAWWCISDTQRLSLEVMTILCRCENIETSEGVPLFVTGVAQVPCPCLLDCKWGNSKGFWKLCQVCQISLEIMTLQPRCEDVETAEGVALTVTGVAQVKIMTEKELLAVACEQFLGKNVQDIKNVVLQTLEGHLRSILGTLTVEQIYQDRDQFAKLVREVAAPDVGRMGIEILSFTIKDVYDKVDYLSSLGKTQTAVVQRDADIGVAEAERDAGIREAECKKEMLDVKFMADTKIADSKRAFELQKSAFSEEVNIKTAEAQLAYELQGAREQQKIRQEEIEIEVVQRKKQIAVEAQEILRTDKELIATVRRPAEAEAHRIQQIAEGEKVKQVLLAQAEAEKIRKIGEAEAAVIEAMGKAEAERMKLKAEAYQKYGDAAKMALVLEALPQIAAKIAAPLTKVDEIVVLSGDNSKVTSEVNRLLAELPASVHALTGVDLSKIPLIKKATGVQV

SEQ ID NO: 16252 - protein, 13 aa, Artificial Sequence
  Synthetic polypeptide
GGQIMRGLLWFRL

SEQ ID NO: 16253 - protein, 46 aa, Artificial Sequence
  Synthetic polypeptide
SQHFGKLRRADHEGAVVVPTINSTCLAAGPGPGGVSPTLRDCLWRL

SEQ ID NO: 16254 - protein, 43 aa, Artificial Sequence
  Synthetic polypeptide
SQHFGKLRRADHEGAVVVPTINSTCLAAGPGPGGVSPTLRGFP

SEQ ID NO: 16255 - protein, 65 aa, Artificial Sequence
  Synthetic polypeptide
SQHFGKLRRADHEGAVVVPTINSTCLAAGPGPGGVSPTLRGTLTVEQIYQDRDQFAKLVREVAAP

SEQ ID NO: 16256 - protein, 53 aa, Artificial Sequence
  Synthetic polypeptide
ARGCCGSDYKQYVFGGWAWAWWCISDTQRDPDSGADLSGPGPVCQAGAGGGSP

SEQ ID NO: 16257 - protein, 413 aa, Artificial Sequence
  Synthetic polypeptide
ARGCCGSDYKQYVFGGWAWAWWCISDTQRISLEIMTLQPRCEDVETAEGVALTVTGVAQVKIMTEKELLAVACEQFLGKNVQDIKNVVLQTLEGHLRSILGTLTVEQIYQDRDQFAKLVREVAAPDVGRMGIEILSFTIKDVYDKVDYLSSLGKTQTAVVQRDADIGVAEAERDAGIREAECKKEMLDVKFMADTKIADSKRAFELQKSAFSEEVNIKTAEAQLAYELQGAREQQKIRQEEIEIEVVQRKKQIAVEAQEILRTDKELIATVRRPAEAEAHRIQQIAEGEKVKQVLLAQAEAEKIRKIGEAEAAVIEAMGKAEAERMKLKAEAYQKYGDAAKMALVLEALPQIAAKIAAPLTKVDEIVVLSGDNSKVTSEVNRLLAELPASVHALTGVDLSKIPLIKKATGVQV

SEQ ID NO: 16258 - protein, 103 aa, Artificial Sequence
  Synthetic polypeptide
ARGCCGSDYKQYVFGGWAWAWWCISDTQRLSLEVMTILCRCENIETSEGVPLFVTGVAQDFPRDYDVAAPLRGRRDGRGGSFNCDGCRPGEDHDGEGTPGRGL

SEQ ID NO: 16259 - protein, 413 aa, Artificial Sequence
  Synthetic polypeptide
ARGCCGSDYKQYVFGGWAWAWWCISDTQRLSLEVMTILCRCENIETSEGVPLFVTGVAQVKIMTEKELLAVACEQFLGKNVQDIKNVVLQTLEGHLRSILGTLTVEQIYQDRDQFAKLVREVAAPDVGRMGIEILSFTIKDVYDKVDYLSSLGKTQTAVVQRDADIGVAEAERDAGIREAECKKEMLDVKFMADTKIADSKRAFELQKSAFSEEVNIKTAEAQLAYELQGAREQQKIRQEEIEIEVVQRKKQIAVEAQEILRTDKELIATVRRPAEAEAHRIQQIAEGEKVKQVLLAQAEAEKIRKIGEAEAAVIEAMGKAEAERMKLKAEAYQKYGDAAKMALVLEALPQIAAKIAAPLTKVDEIVVLSGDNSKVTSEVNRLLAELPASVHALTGVDLSKIPLIKKATGVQV

SEQ ID NO: 16260 - protein, 468 aa, Artificial Sequence
  Synthetic polypeptide
ARGCCGSDYKQYVFGGWAWAWWCISDTQRLSLEVMTILCRCENIETSEGVPLFVTGVAQVPCPCLLDCKWGNSKGFWKLCQVCQISLEIMTLQPRCEDVETAEGVALTVTGVAQVKIMTEKELLAVACEQFLGKNVQDIKNVVLQTLEGHLRSILGTLTVEQIYQDRDQFAKLVREVAAPDVGRMGIEILSFTIKDVYDKVDYLSSLGKTQTAVVQRDADIGVAEAERDAGIREAECKKEMLDVKFMADTKIADSKRAFELQKSAFSEEVNIKTAEAQLAYELQGAREQQKIRQEEIEIEVVQRKKQIAVEAQEILRTDKELIATVRRPAEAEAHRIQQIAEGEKVKQVLLAQAEAEKIRKIGEAEAAVIEAMGKAEAERMKLKAEAYQKYGDAAKMALVLEALPQIAAKIAAPLTKVDEIVVLSGDNSKVTSEVNRLLAELPASVHALTGVDLSKIPLIKKATGVQV

SEQ ID NO: 16261 - protein, 51 aa, Artificial Sequence
  Synthetic polypeptide
LDRHCDVWKAEAGGSLEPGAVVVPTINSTCLAAGPGPGGVSPTLRDCLWRL

SEQ ID NO: 16262 - protein, 48 aa, Artificial Sequence
  Synthetic polypeptide
LDRHCDVWKAEAGGSLEPGAVVVPTINSTCLAAGPGPGGVSPTLRGFP

SEQ ID NO: 16263 - protein, 70 aa, Artificial Sequence
  Synthetic polypeptide
LDRHCDVWKAEAGGSLEPGAVVVPTINSTCLAAGPGPGGVSPTLRGTLTVEQIYQDRDQFAKLVREVAAP

SEQ ID NO: 16264 - protein, 24 aa, Artificial Sequence
  Synthetic polypeptide
TGIAMYGRLRLEDRLSPGLLWFRL

SEQ ID NO: 16265 - protein, 46 aa, Artificial Sequence
  Synthetic polypeptide
AKITPLHSSLGNRGAVVVPTINSTCLAAGPGPGGVSPTLRDCLWRL

SEQ ID NO: 16266 - protein, 43 aa, Artificial Sequence
  Synthetic polypeptide
AKITPLHSSLGNRGAVVVPTINSTCLAAGPGPGGVSPTLRGFP

SEQ ID NO: 16267 - protein, 65 aa, Artificial Sequence
  Synthetic polypeptide
AKITPLHSSLGNRGAVVVPTINSTCLAAGPGPGGVSPTLRGTLTVEQIYQDRDQFAKLVREVAAP

SEQ ID NO: 16268 - protein, 73 aa, Artificial Sequence
  Synthetic polypeptide
AQEAEDALSQDHTTALQPGQQRGCCGSDYKQYVFGGWAWAWWCISDTQRDPDSGADLSGPGPVCQAGAGGGSP

SEQ ID NO: 16269 - protein, 433 aa, Artificial Sequence
  Synthetic polypeptide
AQEAEDALSQDHTTALQPGQQRGCCGSDYKQYVFGGWAWAWWCISDTQRISLEIMTLQPRCEDVETAEGVALTVTGVAQVKIMTEKELLAVACEQFLGKNVQDIKNVVLQTLEGHLRSILGTLTVEQIYQDRDQFAKLVREVAAPDVGRMGIEILSFTIKDVYDKVDYLSSLGKTQTAVVQRDADIGVAEAERDAGIREAECKKEMLDVKFMADTKIADSKRAFELQKSAFSEEVNIKTAEAQLAYELQGAREQQKIRQEEIEIEVVQRKKQIAVEAQEILRTDKELIATVRRPAEAEAHRIQQIAEGEKVKQVLLAQAEAEKIRKIGEAEAAVIEAMGKAEAERMKLKAEAYQKYGDAAKMALVLEALPQIAAKIAAPLTKVDEIVVLSGDNSKVTSEVNRLLAELPASVHALTGVDLSKIPLIKKATGVQV

SEQ ID NO: 16270 - protein, 123 aa, Artificial Sequence
  Synthetic polypeptide
AQEAEDALSQDHTTALQPGQQRGCCGSDYKQYVFGGWAWAWWCISDTQRLSLEVMTILCRCENIETSEGVPLFVTGVAQDFPRDYDVAAPLRGRRDGRGGSFNCDGCRPGEDHDGEGTPGRGL

SEQ ID NO: 16271 - protein, 433 aa, Artificial Sequence
  Synthetic polypeptide
AQEAEDALSQDHTTALQPGQQRGCCGSDYKQYVFGGWAWAWWCISDTQRLSLEVMTILCRCENIETSEGVPLFVTGVAQVKIMTEKELLAVACEQFLGKNVQDIKNVVLQTLEGHLRSILGTLTVEQIYQDRDQFAKLVREVAAPDVGRMGIEILSFTIKDVYDKVDYLSSLGKTQTAVVQRDADIGVAEAERDAGIREAECKKEMLDVKFMADTKIADSKRAFELQKSAFSEEVNIKTAEAQLAYELQGAREQQKIRQEEIEIEVVQRKKQIAVEAQEILRTDKELIATVRRPAEAEAHRIQQIAEGEKVKQVLLAQAEAEKIRKIGEAEAAVIEAMGKAEAERMKLKAEAYQKYGDAAKMALVLEALPQIAAKIAAPLTKVDEIVVLSGDNSKVTSEVNRLLAELPASVHALTGVDLSKIPLIKKATGVQV

SEQ ID NO: 16272 - protein, 488 aa, Artificial Sequence
  Synthetic polypeptide
AQEAEDALSQDHTTALQPGQQRGCCGSDYKQYVFGGWAWAWWCISDTQRLSLEVMTILCRCENIETSEGVPLFVTGVAQVPCPCLLDCKWGNSKGFWKLCQVCQISLEIMTLQPRCEDVETAEGVALTVTGVAQVKIMTEKELLAVACEQFLGKNVQDIKNVVLQTLEGHLRSILGTLTVEQIYQDRDQFAKLVREVAAPDVGRMGIEILSFTIKDVYDKVDYLSSLGKTQTAVVQRDADIGVAEAERDAGIREAECKKEMLDVKFMADTKIADSKRAFELQKSAFSEEVNIKTAEAQLAYELQGAREQQKIRQEEIEIEVVQRKKQIAVEAQEILRTDKELIATVRRPAEAEAHRIQQIAEGEKVKQVLLAQAEAEKIRKIGEAEAAVIEAMGKAEAERMKLKAEAYQKYGDAAKMALVLEALPQIAAKIAAPLTKVDEIVVLSGDNSKVTSEVNRLLAELPASVHALTGVDLSKIPLIKKATGVQV

SEQ ID NO: 16273 - protein, 80 aa, Artificial Sequence
  Synthetic polypeptide
GRWITRGQEFETSLGNMAKLCLYQKKKKLARSGGTYLWSQLLRRLRWEDRLSPGGRGCIEPRSHHCTPAWATEGLLWFRL

SEQ ID NO: 16274 - protein, 52 aa, Artificial Sequence; identical to SEQ ID NO: 16247
  Synthetic polypeptide

SEQ ID NO: 16275 - protein, 412 aa, Artificial Sequence; identical to SEQ ID NO: 16248
  Synthetic polypeptide

SEQ ID NO: 16276 - protein, 102 aa, Artificial Sequence; identical to SEQ ID NO: 16249
  Synthetic polypeptide

SEQ ID NO: 16277 - protein, 412 aa, Artificial Sequence; identical to SEQ ID NO: 16250
  Synthetic polypeptide

SEQ ID NO: 16278 - protein, 467 aa, Artificial Sequence; identical to SEQ ID NO: 16251
  Synthetic polypeptide

SEQ ID NO: 16279 - protein, 29 aa, Artificial Sequence
  Synthetic polypeptide
PGVVAHACNPNTLGGRGGQIMRGLLWFRL

SEQ ID NO: 16280 - protein, 46 aa, Artificial Sequence
  Synthetic polypeptide
SQHFGRPRRADHEGAVVVPTINSTCLAAGPGPGGVSPTLRDCLWRL

SEQ ID NO: 16281 - protein, 43 aa, Artificial Sequence
  Synthetic polypeptide
SQHFGRPRRADHEGAVVVPTINSTCLAAGPGPGGVSPTLRGFP

SEQ ID NO: 16282 - protein, 65 aa, Artificial Sequence
  Synthetic polypeptide
SQHFGRPRRADHEGAVVVPTINSTCLAAGPGPGGVSPTLRGTLTVEQIYQDRDQFAKLVREVAAP

SEQ ID NO: 16283 - protein, 18 aa, Artificial Sequence
  Synthetic polypeptide
GVWNEVRRSRPPLLTRPL

SEQ ID NO: 16284 - protein, 381 aa, Artificial Sequence
  Synthetic polypeptide
HGPCSWNFSGPEGSLDSPTDLSSPTDVGLDCFFYISVYPGYGVEIKVQNISLREGETVTVEGLGGPDPLPLANQSFLLRGQVIRSPTHQAALRFQSLPPPAGPGTFHFHYQAYLLSCHFPRRPAYGDVTVTSLHPGGSARFHCATGYQLKGARHLTCLNATQPFWDSKEPVCIAACGGVIRNATTGRIVSPGFPGNYSNNLTCHWLLEAPEGQRLHLHFEKVSLAEDDDRLIIRNGDNVEAPPVYDSYEVEYLPIEGLLSSGKHFFVELSTDSSGAAAGMALRYEAAHPPTLWVPLWSSAATLATPWSRAPSSSSVLTPTTPSGMRQSQPAEPCAAGRSQTRLAWYSLPTGQSPTVVGRIVSGVCMWKRTSASCWTSECCA

SEQ ID NO: 16285 - protein, 753 aa, Artificial Sequence
  Synthetic polypeptide
HGPCSWNFSGPEGSLDSPTDLSSPTDVGLDCFFYISVYPGYGVEIKVQNISLREGETVTVEGLGGPDPLPLANQSFLLRGQVIRSPTHQAALRFQSLPPPAGPGTFHFHYQAYLLSCHFPRRPAYGDVTVTSLHPGGSARFHCATGYQLKGARHLTCLNATQPFWDSKEPVCIAACGGVIRNATTGRIVSPGFPGNYSNNLTCHWLLEAPEGQRLHLHFEKVSLAEDDDRLIIRNGDNVEAPPVYDSYEVEYLPIEGLLSSGKHFFVELSTDSSGAAAGMALRYEAFQQGHCYEPFVKYGNFSSSTPTYPVGTTVEFSCDPGYTLEQGSIIIECVDPHDPQWNETEPACRAVCSGEITDSAGVVLSPNWPEPYGRGQDCIWGVHVEEDKRIMLDIRVLRIGPGDVLTFYDGDDLTARVLGQYSGPRSHFKLFTSMADVTIQFQSDPGTSVLGYQQGFVIHFFEVPRNDTCPELPEIPNGWKSPSQPELVHGTVVTYQCYPGYQVVGSSVLMCQWDLTWSEDLPSCQRVTSCHDPGDVEHSRRLISSPKFPVGATVQYICDQGFVLMGSSILTCHDRQAGSPKWSDRAPKCLLEQLKPCHGLSAPENGARSPEKQLHPAGATIHFSCAPGYVLKGQASIKCVPGHPSHWSDPPPICRAASLDGFYNSRSLDVAKAPAASSTLDAAHIAAAIFLPLVAMVLLVGGVYFYFSRLQGKSSLQLPRPRPRPYNRITIESAFDNPTYETGETREYEVSI

SEQ ID NO: 16286 - protein, 754 aa, Artificial Sequence
  Synthetic polypeptide
HGPCSWNFSGPEGSLDSPTDLSSPTDVGLDCFFYISVYPGYGVEIKVQNISLREGETVTVEGLGGPDPLPLANQSFLLRGQVIRSPTHQAALRFQSLPPPAGPGTFHFHYQAYLLSCHFPRRPAYGDVTVTSLHPGGSARFHCATGYQLKGARHLTCLNATQPFWDSKEPVCIAACGGVIRNATTGRIVSPGFPGNYSNNLTCHWLLEAPEGQRLHLHFEKVSLAEDDDRLIIRNGDNVEAPPVYDSYEVEYLPIEGLLSSGKHFFVELSTDSSGAAAGMALRYEAFQQGHCYEPFVKYGNFSSSTPTYPVGTTVEFSCDPGYTLEQGSIIIECVDPHDPQWNETEPACRAVCSGEITDSAGVVLSPNWPEPYGRGQDCIWGVHVEEDKRIMLDIRVLRIGPGDVLTFYDGDDLTARVLGQYSGPRSHFKLFTSMADVTIQFQSDPGTSVLGYQQGFVIHFFEVPRNDTCPELPEIPNGWKSPSQPELVHGTVVTYQCYPGYQVVGSSVLMCQWDLTWSEDLPSCQRVTSCHDPGDVEHSRRLISSPKFPVGATVQYICDQGFVLMGSSILTCHDRQAGSPKWSDRAPKCLLEQLKPCHGLSAPENGARSPEKQLHPAGATIHFSCAPGYVLKGQASIKCVPGHPSHWSDPPPICRAASLDGFYNSRSLDVAKAPAASSTLDAAHIAAAIFLPLVAMVLLVGGVYFYFSRLQGKSSLQLPRPRPRPYNRITIESAFDNPTYETGSLSFAGDERI

SEQ ID NO: 16287 - protein, 740 aa, Artificial Sequence
  Synthetic polypeptide
HGPCSWNFSGPEGSLDSPTDLSSPTDVGLDCFFYISVYPGYGVEIKVQNISLREGETVTVEGLGGPDPLPLANQSFLLRGQVIRSPTHQAALRFQSLPPPAGPGTFHFHYQAYLLSCHFPRRPAYGDVTVTSLHPGGSARFHCATGYQLKGARHLTCLNATQPFWDSKEPVCIAACGGVIRNATTGRIVSPGFPGNYSNNLTCHWLLEAPEGQRLHLHFEKVSLAEDDDRLIIRNGDNVEAPPVYDSYEVEYLPIEGLLSSGKHFFVELSTDSSGAAAGMALRYEAFQQGHCYEPFVKYGNFSSSTPTYPVGTTVEFSCDPGYTLEQGSIIIECVDPHDPQWNETEPACRAVCSGEITDSAGVVLSPNWPEPYGRGQDCIWGVHVEEDKRIMLDIRVLRIGPGDVLTFYDGDDLTARVLGQYSGPRSHFKLFTSMADVTIQFQSDPGTSVLGYQQGFVIHFFEVPRNDTCPELPEIPNGWKSPSQPELVHGTVVTYQCYPGYQVVGSSVLMCQWDLTWSEDLPSCQRVTSCHDPGDVEHSRRLISSPKFPVGATVQYICDQGFVLMGSSILTCHDRQAGSPKWSDRAPKCLLEQLKPCHGLSAPENGARSPEKQLHPAGATIHFSCAPGYVLKGQASIKCVPGHPSHWSDPPPICRAVAKAPAASSTLDAAHIAAAIFLPLVAMVLLVGGVYFYFSRLQGKSSLQLPRPRPRPYNRITIESAFDNPTYETGETREYEVSI

SEQ ID NO: 16288 - protein, 268 aa, Artificial Sequence
  Synthetic polypeptide
HGPCSWNFSGPEGSLDSPTDLSSPTDVGLDCFFYISVYPGYGVEIKVQNISLREGETVTVEGLGGPDPLPLANQSFLLRGQVIRSPTHQAALRFQSLPPPAGPGTFHFHYQAYLLSCHFPRRPAYGDVTVTSLHPGGSARFHCATGYQLKGARHLTCLNATQPFWDSKEPVCIAACGGVIRNATTGRIVSPGFPGNYSNNLTCHWLLEAPEGQRLHLHFEKVSLAEDDDRLIIRNGDNVEAPPVYDSYEVTAPPPPPPLQPHYHRVSV

SEQ ID NO: 16289 - protein, 79 aa, Artificial Sequence; identical to SEQ ID NO: 3980
  Synthetic polypeptide

SEQ ID NO: 16290 - protein, 24 aa, Artificial Sequence
  Synthetic polypeptide
GRARWLMPVIPALWEAEACGTRPL

SEQ ID NO: 16291 - protein, 61 aa, Artificial Sequence
  Synthetic polypeptide
GVWNEALVAGISQAQRALWTPLQTSAPPLMLAWTASSTSLSTLAMAWKSRSRISASGKGRQ

SEQ ID NO: 16292 - protein, 392 aa, Artificial Sequence
  Synthetic polypeptide
SQHFGRLRRVERGPCSWNFSGPEGSLDSPTDLSSPTDVGLDCFFYISVYPGYGVEIKVQNISLREGETVTVEGLGGPDPLPLANQSFLLRGQVIRSPTHQAALRFQSLPPPAGPGTFHFHYQAYLLSCHFPRRPAYGDVTVTSLHPGGSARFHCATGYQLKGARHLTCLNATQPFWDSKEPVCIAACGGVIRNATTGRIVSPGFPGNYSNNLTCHWLLEAPEGQRLHLHFEKVSLAEDDDRLIIRNGDNVEAPPVYDSYEVEYLPIEGLLSSGKHFFVELSTDSSGAAAGMALRYEAAHPPTLWVPLWSSAATLATPWSRAPSSSSVLTPTTPSGMRQSQPAEPCAAGRSQTRLAWYSLPTGQSPTVVGRIVSGVCMWKRTSASCWTSECCA

SEQ ID NO: 16293 - protein, 764 aa, Artificial Sequence
  Synthetic polypeptide
SQHFGRLRRVERGPCSWNFSGPEGSLDSPTDLSSPTDVGLDCFFYISVYPGYGVEIKVQNISLREGETVTVEGLGGPDPLPLANQSFLLRGQVIRSPTHQAALRFQSLPPPAGPGTFHFHYQAYLLSCHFPRRPAYGDVTVTSLHPGGSARFHCATGYQLKGARHLTCLNATQPFWDSKEPVCIAACGGVIRNATTGRIVSPGFPGNYSNNLTCHWLLEAPEGQRLHLHFEKVSLAEDDDRLIIRNGDNVEAPPVYDSYEVEYLPIEGLLSSGKHFFVELSTDSSGAAAGMALRYEAFQQGHCYEPFVKYGNFSSSTPTYPVGTTVEFSCDPGYTLEQGSIIIECVDPHDPQWNETEPACRAVCSGEITDSAGVVLSPNWPEPYGRGQDCIWGVHVEEDKRIMLDIRVLRIGPGDVLTFYDGDDLTARVLGQYSGPRSHFKLFTSMADVTIQFQSDPGTSVLGYQQGFVIHFFEVPRNDTCPELPEIPNGWKSPSQPELVHGTVVTYQCYPGYQVVGSSVLMCQWDLTWSEDLPSCQRVTSCHDPGDVEHSRRLISSPKFPVGATVQYICDQGFVLMGSSILTCHDRQAGSPKWSDRAPKCLLEQLKPCHGLSAPENGARSPEKQLHPAGATIHFSCAPGYVLKGQASIKCVPGHPSHWSDPPPICRAASLDGFYNSRSLDVAKAPAASSTLDAAHIAAAIFLPLVAMVLLVGGVYFYFSRLQGKSSLQLPRPRPRPYNRITIESAFDNPTYETGETREYEVSI

SEQ ID NO: 16294 - protein, 765 aa, Artificial Sequence
  Synthetic polypeptide
SQHFGRLRRVERGPCSWNFSGPEGSLDSPTDLSSPTDVGLDCFFYISVYPGYGVEIKVQNISLREGETVTVEGLGGPDPLPLANQSFLLRGQVIRSPTHQAALRFQSLPPPAGPGTFHFHYQAYLLSCHFPRRPAYGDVTVTSLHPGGSARFHCATGYQLKGARHLTCLNATQPFWDSKEPVCIAACGGVIRNATTGRIVSPGFPGNYSNNLTCHWLLEAPEGQRLHLHFEKVSLAEDDDRLIIRNGDNVEAPPVYDSYEVEYLPIEGLLSSGKHFFVELSTDSSGAAAGMALRYEAFQQGHCYEPFVKYGNFSSSTPTYPVGTTVEFSCDPGYTLEQGSIIIECVDPHDPQWNETEPACRAVCSGEITDSAGVVLSPNWPEPYGRGQDCIWGVHVEEDKRIMLDIRVLRIGPGDVLTFYDGDDLTARVLGQYSGPRSHFKLFTSMADVTIQFQSDPGTSVLGYQQGFVIHFFEVPRNDTCPELPEIPNGWKSPSQPELVHGTVVTYQCYPGYQVVGSSVLMCQWDLTWSEDLPSCQRVTSCHDPGDVEHSRRLISSPKFPVGATVQYICDQGFVLMGSSILTCHDRQAGSPKWSDRAPKCLLEQLKPCHGLSAPENGARSPEKQLHPAGATIHFSCAPGYVLKGQASIKCVPGHPSHWSDPPPICRAASLDGFYNSRSLDVAKAPAASSTLDAAHIAAAIFLPLVAMVLLVGGVYFYFSRLQGKSSLQLPRPRPRPYNRITIESAFDNPTYETGSLSFAGDERI

SEQ ID NO: 16295 - protein, 751 aa, Artificial Sequence
  Synthetic polypeptide
SQHFGRLRRVERGPCSWNFSGPEGSLDSPTDLSSPTDVGLDCFFYISVYPGYGVEIKVQNISLREGETVTVEGLGGPDPLPLANQSFLLRGQVIRSPTHQAALRFQSLPPPAGPGTFHFHYQAYLLSCHFPRRPAYGDVTVTSLHPGGSARFHCATGYQLKGARHLTCLNATQPFWDSKEPVCIAACGGVIRNATTGRIVSPGFPGNYSNNLTCHWLLEAPEGQRLHLHFEKVSLAEDDDRLIIRNGDNVEAPPVYDSYEVEYLPIEGLLSSGKHFFVELSTDSSGAAAGMALRYEAFQQGHCYEPFVKYGNFSSSTPTYPVGTTVEFSCDPGYTLEQGSIIIECVDPHDPQWNETEPACRAVCSGEITDSAGVVLSPNWPEPYGRGQDCIWGVHVEEDKRIMLDIRVLRIGPGDVLTFYDGDDLTARVLGQYSGPRSHFKLFTSMADVTIQFQSDPGTSVLGYQQGFVIHFFEVPRNDTCPELPEIPNGWKSPSQPELVHGTVVTYQCYPGYQVVGSSVLMCQWDLTWSEDLPSCQRVTSCHDPGDVEHSRRLISSPKFPVGATVQYICDQGFVLMGSSILTCHDRQAGSPKWSDRAPKCLLEQLKPCHGLSAPENGARSPEKQLHPAGATIHFSCAPGYVLKGQASIKCVPGHPSHWSDPPPICRAVAKAPAASSTLDAAHIAAAIFLPLVAMVLLVGGVYFYFSRLQGKSSLQLPRPRPRPYNRITIESAFDNPTYETGETREYEVSI

SEQ ID NO: 16296 - protein, 279 aa, Artificial Sequence
  Synthetic polypeptide
SQHFGRLRRVERGPCSWNFSGPEGSLDSPTDLSSPTDVGLDCFFYISVYPGYGVEIKVQNISLREGETVTVEGLGGPDPLPLANQSFLLRGQVIRSPTHQAALRFQSLPPPAGPGTFHFHYQAYLLSCHFPRRPAYGDVTVTSLHPGGSARFHCATGYQLKGARHLTCLNATQPFWDSKEPVCIAACGGVIRNATTGRIVSPGFPGNYSNNLTCHWLLEAPEGQRLHLHFEKVSLAEDDDRLIIRNGDNVEAPPVYDSYEVTAPPPPPPLQPHYHRVSV

SEQ ID NO: 16297 - protein, 24 aa, Artificial Sequence
  Synthetic polypeptide
FLHFHLRCGGAPWPACGTKEPRQL

SEQ ID NO: 16298 - protein, 286 aa, Artificial Sequence
  Synthetic polypeptide
GRSQDGRIGTAPVYSSQRELRRTRVISAFPSEVWRGTLARMRYKRTKAALTIIRYYRRYKVKSYIHEVARRFHGVKTMRDYGKHVKWPSPPKVLRRFEEALQTIFNRWRASQLIKSIPASDLPQVRAKVAAVEMLKGQRADLGLQRAWEGNYLASKPDTPQTSGTFVPVANELKRKDKYMNVLFSCHVRKVNRFSKVEDRAIFVTDRHLYKMDPTKQYKVMKTIPLYNLTGLSVSNGKDQLVVFHTKDNKDLIVCLFSKQPTHESRIGELVGVLVNHFKRNHLLIL

SEQ ID NO: 16299 - protein, 331 aa, Artificial Sequence
  Synthetic polypeptide
GRSQDGRIGTAPVYSSQRELRRTRVISAFPSEVWRGTLARMRYKRTKAALTIIRYYRRYKVKSYIHEVARRFHGVKTMRDYGKHVKWPSPPKVLRRFEEALQTIFNRWRASQLIKSIPASDLPQVRAKVAAVEMLKGQRADLGLQRAWEGNYLASKPDTPQTSGTFVPVANELKRKDKYMNVLFSCHVRKVNRFSKVEDRAIFVTDRHLYKMDPTKQYKVMKTIPLYNLTGLSVSNGKDQLVVFHTKDNKDLIVCLFSKQPTHESRIGELVGVLVNHFKSEKRHLQVNVTNPVQCSLHGKKCTVSVETRLNQPQPDFTKNRSGFILSVPGN

SEQ ID NO: 16300 - protein, 59 aa, Artificial Sequence
  Synthetic polypeptide
GVAGHPGPHAVQKNQGSSDNNQVLPALQSEVVHPRGGQTLPWRQDHARLREAREVAKPS

SEQ ID NO: 16301 - protein, 64 aa, Artificial Sequence
  Synthetic polypeptide
ATQNTGVAGHPGPHAVQKNQGSSDNNQVLPALQSEVVHPRGGQTLPWRQDHARLREAREVAKPS

SEQ ID NO: 16302 - protein, 33 aa, Artificial Sequence
  Synthetic polypeptide
EQLRSTAPSVSYAEHGCGGAPWPACGTKEPRQL

SEQ ID NO: 16303 - protein, 278 aa, Artificial Sequence
  Synthetic polypeptide
GRSQDGRIGTAPVYSSQRELRRTRVWRGTLARMRYKRTKAALTIIRYYRRYKVKSYIHEVARRFHGVKTMRDYGKHVKWPSPPKVLRRFEEALQTIFNRWRASQLIKSIPASDLPQVRAKVAAVEMLKGQRADLGLQRAWEGNYLASKPDTPQTSGTFVPVANELKRKDKYMNVLFSCHVRKVNRFSKVEDRAIFVTDRHLYKMDPTKQYKVMKTIPLYNLTGLSVSNGKDQLVVFHTKDNKDLIVCLFSKQPTHESRIGELVGVLVNHFKRNHLLIL

SEQ ID NO: 16304 - protein, 323 aa, Artificial Sequence
  Synthetic polypeptide
GRSQDGRIGTAPVYSSQRELRRTRVWRGTLARMRYKRTKAALTIIRYYRRYKVKSYIHEVARRFHGVKTMRDYGKHVKWPSPPKVLRRFEEALQTIFNRWRASQLIKSIPASDLPQVRAKVAAVEMLKGQRADLGLQRAWEGNYLASKPDTPQTSGTFVPVANELKRKDKYMNVLFSCHVRKVNRFSKVEDRAIFVTDRHLYKMDPTKQYKVMKTIPLYNLTGLSVSNGKDQLVVFHTKDNKDLIVCLFSKQPTHESRIGELVGVLVNHFKSEKRHLQVNVTNPVQCSLHGKKCTVSVETRLNQPQPDFTKNRSGFILSVPGN

SEQ ID NO: 16305 - protein, 14 aa, Artificial Sequence
  Synthetic polypeptide
SSRRRSKMPSQCIR

SEQ ID NO: 16306 - protein, 15 aa, Artificial Sequence
  Synthetic polypeptide
TFDQVDEGAKCLHSV

SEQ ID NO: 16307 - protein, 332 aa, Artificial Sequence
  Synthetic polypeptide
TKEQNAFTVYKMISEFTWPNHDLPSDKEAVKKLIERCGFQDDVAYGKTKIFIRTPRTLFTLEELRAQMLIRIVLFLQKVWRGTLARMRYKRTKAALTIIRYYRRYKVKSYIHEVARRFHGVKTMRDYGKHVKWPSPPKVLRRFEEALQTIFNRWRASQLIKSIPASDLPQVRAKVAAVEMLKGQRADLGLQRAWEGNYLASKPDTPQTSGTFVPVANELKRKDKYMNVLFSCHVRKVNRFSKVEDRAIFVTDRHLYKMDPTKQYKVMKTIPLYNLTGLSVSNGKDQLVVFHTKDNKDLIVCLFSKQPTHESRIGELVGVLVNHFKRNHLLIL

SEQ ID NO: 16308 - protein, 377 aa, Artificial Sequence
  Synthetic polypeptide
TKEQNAFTVYKMISEFTWPNHDLPSDKEAVKKLIERCGFQDDVAYGKTKIFIRTPRTLFTLEELRAQMLIRIVLFLQKVWRGTLARMRYKRTKAALTIIRYYRRYKVKSYIHEVARRFHGVKTMRDYGKHVKWPSPPKVLRRFEEALQTIFNRWRASQLIKSIPASDLPQVRAKVAAVEMLKGQRADLGLQRAWEGNYLASKPDTPQTSGTFVPVANELKRKDKYMNVLFSCHVRKVNRFSKVEDRAIFVTDRHLYKMDPTKQYKVMKTIPLYNLTGLSVSNGKDQLVVFHTKDNKDLIVCLFSKQPTHESRIGELVGVLVNHFKSEKRHLQVNVTNPVQCSLHGKKCTVSVETRLNQPQPDFTKNRSGFILSVPGN

SEQ ID NO: 16309 - protein, 19 aa, Artificial Sequence
  Synthetic polypeptide
CNPLQEEIKQKKLFCHWFY

SEQ ID NO: 16310 - protein, 42 aa, Artificial Sequence
  Synthetic polypeptide
TKKAILSLVLLTKIKILYFKISSALCITVQILCSRICGLKAN

SEQ ID NO: 16311 - protein, 460 aa, Artificial Sequence
  Synthetic polypeptide
VIHCRKRLNKKSYSVIGFIDKNKDTLFQDFKRLMYNSSNPVLKNMWPEGKLSITEVTKRPLTAATLFKNSMIALVDNLASKEPYYVRCIKPNDKKSPQIFDDERCRHQVEYLGLLENVRVRRAGFAFRQTYEKFLHRYKMISEFTWPNHDLPSDKEAVKKLIERCGFQDDVAYGKTKIFIRTPRTLFTLEELRAQMLIRIVLFLQKVWRGTLARMRYKRTKAALTIIRYYRRYKVKSYIHEVARRFHGVKTMRDYGKHVKWPSPPKVLRRFEEALQTIFNRWRASQLIKSIPASDLPQVRAKVAAVEMLKGQRADLGLQRAWEGNYLASKPDTPQTSGTFVPVANELKRKDKYMNVLFSCHVRKVNRFSKVEDRAIFVTDRHLYKMDPTKQYKVMKTIPLYNLTGLSVSNGKDQLVVFHTKDNKDLIVCLFSKQPTHESRIGELVGVLVNHFKRNHLLIL

SEQ ID NO: 16312 - protein, 505 aa, Artificial Sequence
  Synthetic polypeptide
VIHCRKRLNKKSYSVIGFIDKNKDTLFQDFKRLMYNSSNPVLKNMWPEGKLSITEVTKRPLTAATLFKNSMIALVDNLASKEPYYVRCIKPNDKKSPQIFDDERCRHQVEYLGLLENVRVRRAGFAFRQTYEKFLHRYKMISEFTWPNHDLPSDKEAVKKLIERCGFQDDVAYGKTKIFIRTPRTLFTLEELRAQMLIRIVLFLQKVWRGTLARMRYKRTKAALTIIRYYRRYKVKSYIHEVARRFHGVKTMRDYGKHVKWPSPPKVLRRFEEALQTIFNRWRASQLIKSIPASDLPQVRAKVAAVEMLKGQRADLGLQRAWEGNYLASKPDTPQTSGTFVPVANELKRKDKYMNVLFSCHVRKVNRFSKVEDRAIFVTDRHLYKMDPTKQYKVMKTIPLYNLTGLSVSNGKDQLVVFHTKDNKDLIVCLFSKQPTHESRIGELVGVLVNHFKSEKRHLQVNVTNPVQCSLHGKKCTVSVETRLNQPQPDFTKNRSGFILSVPGN

SEQ ID NO: 16313 - protein, 7 aa, Artificial Sequence
  Synthetic polypeptide
MCAPAQT

SEQ ID NO: 16314 - protein, 1067 aa, Artificial Sequence; identical to SEQ ID NO: 1526
  Synthetic polypeptide

SEQ ID NO: 16315 - protein, 1267 aa, Artificial Sequence; identical to SEQ ID NO: 1493
  Synthetic polypeptide

SEQ ID NO: 16316 - protein, 108 aa, Artificial Sequence; identical to SEQ ID NO: 3528
  Synthetic polypeptide

SEQ ID NO: 16317 - protein, 102 aa, Artificial Sequence; identical to SEQ ID NO: 3600
  Synthetic polypeptide

SEQ ID NO: 16318 - protein, 137 aa, Artificial Sequence; identical to SEQ ID NO: 3198
  Synthetic polypeptide

SEQ ID NO: 16319 - protein, 131 aa, Artificial Sequence; identical to SEQ ID NO: 3270
  Synthetic polypeptide

SEQ ID NO: 16320 - protein, 148 aa, Artificial Sequence; identical to SEQ ID NO: 3139
  Synthetic polypeptide

SEQ ID NO: 16321 - protein, 106 aa, Artificial Sequence; identical to SEQ ID NO: 3539
  Synthetic polypeptide

SEQ ID NO: 16322 - protein, 100 aa, Artificial Sequence; identical to SEQ ID NO: 3630
  Synthetic polypeptide

SEQ ID NO: 16323 - protein, 117 aa, Artificial Sequence; identical to SEQ ID NO: 3400
  Synthetic polypeptide

SEQ ID NO: 16324 - protein, 72 aa, Artificial Sequence; identical to SEQ ID NO: 4136
  Synthetic polypeptide

SEQ ID NO: 16325 - protein, 1080 aa, Artificial Sequence; identical to SEQ ID NO: 1523
  Synthetic polypeptide

SEQ ID NO: 16326 - protein, 1280 aa, Artificial Sequence; identical to SEQ ID NO: 1491
  Synthetic polypeptide

SEQ ID NO: 16327 - protein, 121 aa, Artificial Sequence; identical to SEQ ID NO: 3360
  Synthetic polypeptide

SEQ ID NO: 16328 - protein, 115 aa, Artificial Sequence; identical to SEQ ID NO: 3427
  Synthetic polypeptide

SEQ ID NO: 16329 - protein, 1098 aa, Artificial Sequence; identical to SEQ ID NO: 1521
  Synthetic polypeptide

SEQ ID NO: 16330 - protein, 1298 aa, Artificial Sequence; identical to SEQ ID NO: 1486
  Synthetic polypeptide

SEQ ID NO: 16331 - protein, 139 aa, Artificial Sequence; identical to SEQ ID NO: 3178
  Synthetic polypeptide

SEQ ID NO: 16332 - protein, 133 aa, Artificial Sequence; identical to SEQ ID NO: 3242
  Synthetic polypeptide

SEQ ID NO: 16333 - protein, 123 aa, Artificial Sequence; identical to SEQ ID NO: 3344
  Synthetic polypeptide

SEQ ID NO: 16334 - protein, 117 aa, Artificial Sequence; identical to SEQ ID NO: 3399
  Synthetic polypeptide

SEQ ID NO: 16335 - protein, 134 aa, Artificial Sequence; identical to SEQ ID NO: 3233
  Synthetic polypeptide

SEQ ID NO: 16336 - protein, 80 aa, Artificial Sequence
  Synthetic polypeptide
GRVRWLMPVIPALWEAEADRSLEDIQEVQGYVLIAHNQVRQVPLQRLRIVRGTQLFEDNYALAVLDNGDPLNNTTPVTGA

SEQ ID NO: 16337 - protein, 117 aa, Artificial Sequence
  Synthetic polypeptide
GRVRWLMPVIPALWEAEADRSLEDIQEVQGYVLIAHNQVRQVPLQRLRIVRGTQLFEDNYALAVLDNGDPLNNTTPVTGASPGGLRELQLRSLTEILKGGVLIQRNPQLCYQDTILW

SEQ ID NO: 16338 - protein, 581 aa, Artificial Sequence
  Synthetic polypeptide
GRVRWLMPVIPALWEAEADRSLEDIQEVQGYVLIAHNQVRQVPLQRLRIVRGTQLFEDNYALAVLDNGDPLNNTTPVTGASPGGLRELQLRSLTEILKGGVLIQRNPQLCYQDTILWKDIFHKNNQLALTLIDTNRSRACHPCSPMCKGSRCWGESSEDCQSLTRTVCAGGCARCKGPLPTDCCHEQCAAGCTGPKHSDCLACLHFNHSGICELHCPALVTYNTDTFESMPNPEGRYTFGASCVTACPYNYLSTDVGSCTLVCPLHNQEVTAEDGTQRCEKCSKPCARVCYGLGMEHLREVRAVTSANIQEFAGCKKIFGSLAFLPESFDGDPASNTAPLQPEQLQVFETLEEITGYLYISAWPDSLPDLSVFQNLQVIRGRILHNGAYSLTLQGLGISWLGLRSLRELGSGLALIHHNTHLCFVHTVPWDQLFRNPHQALLHTANRPEDECVGEGLACHQLCARGHCWGPGPTQCVNCSQFLRGQECVEECRVLQGLPREYVNARHCLPCHPECQPQNGSVTCFGPEADQCVACAHYKDPPFCVARCPSGVKPDLSYMPIWKFPDEEGACQPCPINCTHS

SEQ ID NO: 16339 - protein, 1003 aa, Artificial Sequence
  Synthetic polypeptide
GRVRWLMPVIPALWEAEADRSLEDIQEVQGYVLIAHNQVRQVPLQRLRIVRGTQLFEDNYALAVLDNGDPLNNTTPVTGASPGGLRELQLRSLTEILKGGVLIQRNPQLCYQDTILWKDIFHKNNQLALTLIDTNRSRACHPCSPMCKGSRCWGESSEDCQSLTRTVCAGGCARCKGPLPTDCCHEQCAAGCTGPKHSDCLACLHFNHSGICELHCPALVTYNTDTFESMPNPEGRYTFGASCVTACPYNYLSTDVGSCTLVCPLHNQEVTAEDGTQRCEKCSKPCARVCYGLGMEHLREVRAVTSANIQEFAGCKKIFGSLAFLPESFDGDPASNTAPLQPEQLQVFETLEEITGYLYISAWPDSLPDLSVFQNLQVIRGRILHNGAYSLTLQGLGISWLGLRSLRELGSGLALIHHNTHLCFVHTVPWDQLFRNPHQALLHTANRPEDECVGEGLACHQLCARGHCWGPGPTQCVNCSQFLRGQECVEECRVLQGLPREYVNARHCLPCHPECQPQNGSVTCFGPEADQCVACAHYKDPPFCVARCPSGVKPDLSYMPIWKFPDEEGACQPCPINCTHSCVDLDDKGCPAEQRASPLTSIISAVVGILLVVVLGVVFGILIKRRQQKIRKYTMRRLLQETELVEPLTPSGAMPNQAQMRILKETELRKVKVLGSGAFGTVYKGIWIPDGENVKIPVAIKVLRENTSPKANKEILDEAYVMAGVGSPYVSRLLGICLTSTVQLVTQLMPYGCLLDHVRENRGRLGSQDLLNWCMQIAKGMSYLEDVRLVHRDLAARNVLVKSPNHVKITDFGLARLLDIDETEYHADGGKVPIKWMALESILRRRFTHQSDVWSYGVTVWELMTFGAKPYDGIPAREIPDLLEKGERLPQPPICTIDVYMIMVKCWMIDSECRPRFRELVSEFSRMARDPQRFVVIQNEDLGPASPLDSTFYRSLLEDDDMGDLVDAEEYLVPQQGFFCPDPAPGAGGMVHHRHRSSSTRNM

SEQ ID NO: 16340 - protein, 1203 aa, Artificial Sequence
  Synthetic polypeptide
GRVRWLMPVIPALWEAEADRSLEDIQEVQGYVLIAHNQVRQVPLQRLRIVRGTQLFEDNYALAVLDNGDPLNNTTPVTGASPGGLRELQLRSLTEILKGGVLIQRNPQLCYQDTILWKDIFHKNNQLALTLIDTNRSRACHPCSPMCKGSRCWGESSEDCQSLTRTVCAGGCARCKGPLPTDCCHEQCAAGCTGPKHSDCLACLHFNHSGICELHCPALVTYNTDTFESMPNPEGRYTFGASCVTACPYNYLSTDVGSCTLVCPLHNQEVTAEDGTQRCEKCSKPCARVCYGLGMEHLREVRAVTSANIQEFAGCKKIFGSLAFLPESFDGDPASNTAPLQPEQLQVFETLEEITGYLYISAWPDSLPDLSVFQNLQVIRGRILHNGAYSLTLQGLGISWLGLRSLRELGSGLALIHHNTHLCFVHTVPWDQLFRNPHQALLHTANRPEDECVGEGLACHQLCARGHCWGPGPTQCVNCSQFLRGQECVEECRVLQGLPREYVNARHCLPCHPECQPQNGSVTCFGPEADQCVACAHYKDPPFCVARCPSGVKPDLSYMPIWKFPDEEGACQPCPINCTHSCVDLDDKGCPAEQRASPLTSIISAVVGILLVVVLGVVFGILIKRRQQKIRKYTMRRLLQETELVEPLTPSGAMPNQAQMRILKETELRKVKVLGSGAFGTVYKGIWIPDGENVKIPVAIKVLRENTSPKANKEILDEAYVMAGVGSPYVSRLLGICLTSTVQLVTQLMPYGCLLDHVRENRGRLGSQDLLNWCMQIAKGMSYLEDVRLVHRDLAARNVLVKSPNHVKITDFGLARLLDIDETEYHADGGKVPIKWMALESILRRRFTHQSDVWSYGVTVWELMTFGAKPYDGIPAREIPDLLEKGERLPQPPICTIDVYMIMVKCWMIDSECRPRFRELVSEFSRMARDPQRFVVIQNEDLGPASPLDSTFYRSLLEDDDMGDLVDAEEYLVPQQGFFCPDPAPGAGGMVHHRHRSSSTRSGGGDLTLGLEPSEEEAPRSPLAPSEGAGSDVFDGDLGMGAAKGLQSLPTHDPSPLQRYSEDPTVPLPSETDGYVAPLTCSPQPEYVNQPDVRPQPPSPREGPLPAARPAGATLERPKTLSPGKNGVVKDVFAFGGAVENPEYLTPQGGAAPQPHPPPAFSPAFDNLYYWDQDPPERGAPPSTFKGTPTAENPEYLGLDVPV

SEQ ID NO: 16341 - protein, 33 aa, Artificial Sequence
  Synthetic polypeptide
GYPGGAGLRAHRSQPSEAGPTAEAADCARHPAL

SEQ ID NO: 16342 - protein, 29 aa, Artificial Sequence
  Synthetic polypeptide
SQHFGRPRRTDHLRISRRCRATCSSLTTK

SEQ ID NO: 16343 - protein, 18 aa, Artificial Sequence
  Synthetic polypeptide
AKEARDKIPYCLIPFMDP

SEQ ID NO: 16344 - protein, 266 aa, Artificial Sequence
  Synthetic polypeptide
AKEARDKIPYCLIPFMDPASNTAPLQPEQLQVFETLEEITGYLYISAWPDSLPDLSVFQNLQVIRGRILHNGAYSLTLQGLGISWLGLRSLRELGSGLALIHHNTHLCFVHTVPWDQLFRNPHQALLHTANRPEDECVGEGLACHQLCARGHCWGPGPTQCVNCSQFLRGQECVEECRVLQGLPREYVNARHCLPCHPECQPQNGSVTCFGPEADQCVACAHYKDPPFCVARCPSGVKPDLSYMPIWKFPDEEGACQPCPINCTHS

SEQ ID NO: 16345 - protein, 688 aa, Artificial Sequence
  Synthetic polypeptide
AKEARDKIPYCLIPFMDPASNTAPLQPEQLQVFETLEEITGYLYISAWPDSLPDLSVFQNLQVIRGRILHNGAYSLTLQGLGISWLGLRSLRELGSGLALIHHNTHLCFVHTVPWDQLFRNPHQALLHTANRPEDECVGEGLACHQLCARGHCWGPGPTQCVNCSQFLRGQECVEECRVLQGLPREYVNARHCLPCHPECQPQNGSVTCFGPEADQCVACAHYKDPPFCVARCPSGVKPDLSYMPIWKFPDEEGACQPCPINCTHSCVDLDDKGCPAEQRASPLTSIISAVVGILLVVVLGVVFGILIKRRQQKIRKYTMRRLLQETELVEPLTPSGAMPNQAQMRILKETELRKVKVLGSGAFGTVYKGIWIPDGENVKIPVAIKVLRENTSPKANKEILDEAYVMAGVGSPYVSRLLGICLTSTVQLVTQLMPYGCLLDHVRENRGRLGSQDLLNWCMQIAKGMSYLEDVRLVHRDLAARNVLVKSPNHVKITDFGLARLLDIDETEYHADGGKVPIKWMALESILRRRFTHQSDVWSYGVTVWELMTFGAKPYDGIPAREIPDLLEKGERLPQPPICTIDVYMIMVKCWMIDSECRPRFRELVSEFSRMARDPQRFVVIQNEDLGPASPLDSTFYRSLLEDDDMGDLVDAEEYLVPQQGFFCPDPAPGAGGMVHHRHRSSSTRNM

SEQ ID NO: 16346 - protein, 888 aa, Artificial Sequence
  Synthetic polypeptide
AKEARDKIPYCLIPFMDPASNTAPLQPEQLQVFETLEEITGYLYISAWPDSLPDLSVFQNLQVIRGRILHNGAYSLTLQGLGISWLGLRSLRELGSGLALIHHNTHLCFVHTVPWDQLFRNPHQALLHTANRPEDECVGEGLACHQLCARGHCWGPGPTQCVNCSQFLRGQECVEECRVLQGLPREYVNARHCLPCHPECQPQNGSVTCFGPEADQCVACAHYKDPPFCVARCPSGVKPDLSYMPIWKFPDEEGACQPCPINCTHSCVDLDDKGCPAEQRASPLTSIISAVVGILLVVVLGVVFGILIKRRQQKIRKYTMRRLLQETELVEPLTPSGAMPNQAQMRILKETELRKVKVLGSGAFGTVYKGIWIPDGENVKIPVAIKVLRENTSPKANKEILDEAYVMAGVGSPYVSRLLGICLTSTVQLVTQLMPYGCLLDHVRENRGRLGSQDLLNWCMQIAKGMSYLEDVRLVHRDLAARNVLVKSPNHVKITDFGLARLLDIDETEYHADGGKVPIKWMALESILRRRFTHQSDVWSYGVTVWELMTFGAKPYDGIPAREIPDLLEKGERLPQPPICTIDVYMIMVKCWMIDSECRPRFRELVSEFSRMARDPQRFVVIQNEDLGPASPLDSTFYRSLLEDDDMGDLVDAEEYLVPQQGFFCPDPAPGAGGMVHHRHRSSSTRSGGGDLTLGLEPSEEEAPRSPLAPSEGAGSDVFDGDLGMGAAKGLQSLPTHDPSPLQRYSEDPTVPLPSETDGYVAPLTCSPQPEYVNQPDVRPQPPSPREGPLPAARPAGATLERPKTLSPGKNGVVKDVFAFGGAVENPEYLTPQGGAAPQPHPPPAFSPAFDNLYYWDQDPPERGAPPSTFKGTPTAENPEYLGLDVPV

SEQ ID NO: 16347 - protein, 26 aa, Artificial Sequence
  Synthetic polypeptide
MNLRNITLSKRSQRQDSILSDPLYGP

SEQ ID NO: 16348 - protein, 41 aa, Artificial Sequence
  Synthetic polypeptide
MNLRNITLSKRSQRQDSILSDPLYGPSLQHCPAPARAAPSV

SEQ ID NO: 16349 - protein, 5 aa, Artificial Sequence
  Synthetic polypeptide
SPLWT

SEQ ID NO: 16350 - protein, 50 aa, Artificial Sequence
  Synthetic polypeptide
SPLWTQPPTLPRSSQSSSKCLRLWKRSQVTYTSQHGRTACLTSASSRTCK

SEQ ID NO: 16351 - protein, 13 aa, Artificial Sequence
  Synthetic polypeptide
AQEFKNSVGNIGP

SEQ ID NO: 16352 - protein, 28 aa, Artificial Sequence
  Synthetic polypeptide
AQEFKNSVGNIGPSLQHCPAPARAAPSV

SEQ ID NO: 16353 - protein, 26 aa, Artificial Sequence
  Synthetic polypeptide
SQHFGRLKQEDCLSPGIQEQRGQHRT

SEQ ID NO: 16354 - protein, 71 aa, Artificial Sequence
  Synthetic polypeptide
SQHFGRLKQEDCLSPGIQEQRGQHRTQPPTLPRSSQSSSKCLRLWKRSQVTYTSQHGRTACLTSASSRTCK

SEQ ID NO: 16355 - protein, 108 aa, Artificial Sequence
  Synthetic polypeptide
EAKVGGSFEARSSRPAWATYPLTSIISAVVGILLVVVLGVVFGILIKRRQQKIRKYTMRRLLQETELVEPLTPSGAMPNQAQMRILKETELRKVKGIWIPDGENVKIP

SEQ ID NO: 16356 - protein, 253 aa, Artificial Sequence
  Synthetic polypeptide
EAKVGGSFEARSSRPAWATYPLTSIISAVVGILLVVVLGVVFGILIKRRQQKIRKYTMRRLLQETELVEPLTPSGAMPNQAQMRILKETELRKVKVLGSGAFGTVYKGIWIPDGENVKIPVAIKVLRENTSPKANKEILDEAYVMAGVGSPYVSRLLGICLTSTVQLVTQLMPYGCLLDHVRENRGRLGSQDLLNWCMQIAKGMSYLEDVRLVHRDLAARNVLVKSPNHVKITDFGLARLLDIDETEYHADGG

SEQ ID NO: 16357 - protein, 426 aa, Artificial Sequence
  Synthetic polypeptide
EAKVGGSFEARSSRPAWATYPLTSIISAVVGILLVVVLGVVFGILIKRRQQKIRKYTMRRLLQETELVEPLTPSGAMPNQAQMRILKETELRKVKVLGSGAFGTVYKGIWIPDGENVKIPVAIKVLRENTSPKANKEILDEAYVMAGVGSPYVSRLLGICLTSTVQLVTQLMPYGCLLDHVRENRGRLGSQDLLNWCMQIAKGMSYLEDVRLVHRDLAARNVLVKSPNHVKITDFGLARLLDIDETEYHADGGKVPIKWMALESILRRRFTHQSDVWSYGVTVWELMTFGAKPYDGIPAREIPDLLEKGERLPQPPICTIDVYMIMVKCWMIDSECRPRFRELVSEFSRMARDPQRFVVIQNEDLGPASPLDSTFYRSLLEDDDMGDLVDAEEYLVPQQGFFCPDPAPGAGGMVHHRHRSSSTRNM

SEQ ID NO: 16358 - protein, 626 aa, Artificial Sequence
  Synthetic polypeptide
EAKVGGSFEARSSRPAWATYPLTSIISAVVGILLVVVLGVVFGILIKRRQQKIRKYTMRRLLQETELVEPLTPSGAMPNQAQMRILKETELRKVKVLGSGAFGTVYKGIWIPDGENVKIPVAIKVLRENTSPKANKEILDEAYVMAGVGSPYVSRLLGICLTSTVQLVTQLMPYGCLLDHVRENRGRLGSQDLLNWCMQIAKGMSYLEDVRLVHRDLAARNVLVKSPNHVKITDFGLARLLDIDETEYHADGGKVPIKWMALESILRRRFTHQSDVWSYGVTVWELMTFGAKPYDGIPAREIPDLLEKGERLPQPPICTIDVYMIMVKCWMIDSECRPRFRELVSEFSRMARDPQRFVVIQNEDLGPASPLDSTFYRSLLEDDDMGDLVDAEEYLVPQQGFFCPDPAPGAGGMVHHRHRSSSTRSGGGDLTLGLEPSEEEAPRSPLAPSEGAGSDVFDGDLGMGAAKGLQSLPTHDPSPLQRYSEDPTVPLPSETDGYVAPLTCSPQPEYVNQPDVRPQPPSPREGPLPAARPAGATLERPKTLSPGKNGVVKDVFAFGGAVENPEYLTPQGGAAPQPHPPPAFSPAFDNLYYWDQDPPERGAPPSTFKGTPTAENPEYLGLDVPV

SEQ ID NO: 16359 - protein, 64 aa, Artificial Sequence
  Synthetic polypeptide
GQKLETSLGNIPSDVHHLCGGWHSAGRGLGGGLWDPHQATAAEDPEVHDAETAAGNGAGGAADT

SEQ ID NO: 16360 - protein, 26 aa, Artificial Sequence
  Synthetic polypeptide
SQHFRRPRWEDPLRPEARDQPGQHTL

SEQ ID NO: 16361 - protein, 13 aa, Artificial Sequence
  Synthetic polypeptide
SQEFKTSLGNIVG

SEQ ID NO: 16362 - protein, 122 aa, Artificial Sequence; identical to SEQ ID NO: 3352
  Synthetic polypeptide

SEQ ID NO: 16363 - protein, 322 aa, Artificial Sequence; identical to SEQ ID NO: 2415
  Synthetic polypeptide

SEQ ID NO: 16364 - protein, 76 aa, Artificial Sequence
  Synthetic polypeptide
SQEFKTSLGNINEDLGPASPLDSTFYRSLLEDDDMGDLVDAEEYLVPQQGFFCPDPAPGAGGMVHHRHRSSSTRNM

SEQ ID NO: 16365 - protein, 276 aa, Artificial Sequence
  Synthetic polypeptide
SQEFKTSLGNINEDLGPASPLDSTFYRSLLEDDDMGDLVDAEEYLVPQQGFFCPDPAPGAGGMVHHRHRSSSTRSGGGDLTLGLEPSEEEAPRSPLAPSEGAGSDVFDGDLGMGAAKGLQSLPTHDPSPLQRYSEDPTVPLPSETDGYVAPLTCSPQPEYVNQPDVRPQPPSPREGPLPAARPAGATLERPKTLSPGKNGVVKDVFAFGGAVENPEYLTPQGGAAPQPHPPPAFSPAFDNLYYWDQDPPERGAPPSTFKGTPTAENPEYLGLDVPV

SEQ ID NO: 16366 - protein, 25 aa, Artificial Sequence
  Synthetic polypeptide
SQYFWRLRWEDPLKPGVQDQPGQHK

SEQ ID NO: 16367 - protein, 16 aa, Artificial Sequence
  Synthetic polypeptide
VNPAASRRPTWSWPVL

SEQ ID NO: 16368 - protein, 24 aa, Artificial Sequence
  Synthetic polypeptide
ATQKHKPMQTTTVCCSWRHQQRLQ

SEQ ID NO: 16369 - protein, 80 aa, Artificial Sequence
  Synthetic polypeptide
GQEFETSLGDTEAQAYADDNSLLFMETSAKTAMNVNEIFMAIAKKLPKNEPQNATGAPGRNRGVDLQENNPASRSQCCSN

SEQ ID NO: 16370 - protein, 83 aa, Artificial Sequence
  Synthetic polypeptide
GQEFETSLGDTEAQAYADDNSLLFMETSAKTAMNVNEIFMAIGQLLLLPSSLHHSKGISPVCWSRVGLRGPFTTLFFFFFFFF

SEQ ID NO: 16371 - protein, 77 aa, Artificial Sequence
  Synthetic polypeptide
SQCLGRLEWEDHLRPGVRDQPRRHRSTSLCRRQQFAVHGDISKDCNERERNLHGNRSVASPPLLSPPQQGHITCLLV

SEQ ID NO: 16372 - protein, 56 aa, Artificial Sequence
  Synthetic polypeptide
SQCLGRLEWEDHLRPGVRDQPRRHRSTSLCRRQQFAVHGDISKDCNERERNLHGNS

SEQ ID NO: 16373 - protein, 22 aa, Artificial Sequence
  Synthetic polypeptide
LVCPGKELHELAPRQGPAAEPV

SEQ ID NO: 16374 - protein, 1080 aa, Artificial Sequence
  Synthetic polypeptide
QADSDSNPALPSSWCAPGKNCMNLPPDKVQLLSQYDNEKKWELICDQERFQVKNPPAAYIQKLKSYVDTGGVSRKVAADWMSNLGFKRRVQESTQVLRELETSLRTNHIGWVQEFLNEENRGLDVLLEYLAFAQCSVTYDMESTDNGASNSEKNKPLEQSVEDLSKGPPSSVPKSRHLTIKLTPAHSRKALRNSRIVSQKDDVHVCIMCLRAIMNYQSGFSLVMNHPACVNEIALSLNNKNPRTKALVLELLAAVCLVRGGHDIILAAFDNFKEVCGEQHRFEKLMEYFRNEDSNIDFMVACMQFINIVVHSVENMNFRVFLQYEFTHLGLDLYLERLRLTESDKLQVQIQAYLDNIFDVGALLEDTETKNAVLEHMEELQEQVALLTERLRDAENESMAKIAELEKQLSQARKELETLRERFSESTAMGPSRRPPEPEKAPPAAPTRPSALELKVEELEEKGLIRILRGPGDAVSIEILPVAVATPSGGDAPTPGVPTGSPSPDLAPAAEPAPGAAPPPPPPLPGLPSPQEAPPSAPPQAPPLPGSPEPPPAPPLPGDLPPPPPPPPPPPGTDGPVPPPPPPPPPPPGGPPDALGRRDSELGPGVKAKKPIQTKFRMPLLNWVALKPSQITGTVFTELNDEKVLQELDMSDFEEQFKTKSQGPSLDLSALKSKAAQKAPSKATLIEANRAKNLAITLRKGNLGAERICQAIEAYDLQALGLDFLELLMRFLPTEYERSLITRFEREQRPMEELSEEDRFMLCFSRIPRLPERMTTLTFLGNFPDTAQLLMPQLNAIIAASMSIKSSDKLRQILEIVLAFGNYMNSSKRGAAYGFRLQSLDALLEMKSTDRKQTLLHYLVKVIAEKYPQLTGFHSDLHFLDKAGSVSLDSVLADVRSLQRGLELTQREFVRQDDCMVLKEFLRANSPTMDKLLADSKTAQEAFESVVEYFGENPKTTSPGLFFSLFSRFIKAYKKAEQEVEQWKKEAAAQEAGADTPGKGEPPAPKSPPKARRPQMDLISELKRRQQKEPLIYESDRDGAIEDIITDLRNQPYIRADTGRRSARRRPPGPPLQVTSDLSL

SEQ ID NO: 16375 - protein, 1076 aa, Artificial Sequence
  Synthetic polypeptide
QADSDSNPALPSSWCAPGKNCMNLPPDKVQLLSQYDNEKKWELICDQERFQVKNPPAAYIQKLKSYVDTGGVSRKVAADWMSNLGFKRRVQESTQVLRELETSLRTNHIGWVQEFLNEENRGLDVLLEYLAFAQCSVTYDMESTDNGASNSEKNKPLEQSVEDLSKGPPSSVPKSRHLTIKLTPAHSRKALRNSRIVSQKDDVHVCIMCLRAIMNYQSGFSLVMNHPACVNEIALSLNNKNPRTKALVLELLAAVCLVRGGHDIILAAFDNFKEVCGEQHRFEKLMEYFRNEDSNIDFMVACMQFINIVVHSVENMNFRVFLQYEFTHLGLDLYLERLRLTESDKLQVQIQAYLDNIFDVGALLEDTETKNAVLEHMEELQEQVALLTERLRDAENESMAKIAELEKQLSQARKELETLRERFSESTAMGPSRRPPEPEKAPPAAPTRPSALELKVEELEEKGLIRILRGPGDAVSIEILPVAVATPSGGDAPTPGVPTGSPSPDLAPAAEPAPGAAPPPPPPLPGLPSPQEAPPSAPPQAPPLPGSPEPPPAPPLPGDLPPPPPPPPPPPGTDGPVPPPPPPPPPPPGGPPDALGRRDSELGPGVKAKKPIQTKFRMPLLNWVALKPSQITGTVFTELNDEKVLQELDMSDFEEQFKTKSQGPSLDLSALKSKAAQKAPSKATLIEANRAKNLAITLRKGNLGAERICQAIEAYDLQALGLDFLELLMRFLPTEYERSLITRFEREQRPMEELSEEDRFMLCFSRIPRLPERMTTLTFLGNFPDTAQLLMPQLNAIIAASMSIKSSDKLRQILEIVLAFGNYMNSSKRGAAYGFRLQSLDALLEMKSTDRKQTLLHYLVKVIAEKYPQLTGFHSDLHFLDKAGSVSLDSVLADVRSLQRGLELTQREFVRQDDCMVLKEFLRANSPTMDKLLADSKTAQEAFESVVEYFGENPKTTSPGLFFSLFSRFIKAYKKAEQEVEQWKKEAAAQEAGADTPGKGEPPAPKSPPKARRPQMDLISELKRRQQKEPLIYESDRDGAIEDIITVIKTVPFTARTGKRTSRLLCEASLGEEMPL

SEQ ID NO: 16376 - protein, 21 aa, Artificial Sequence
  Synthetic polypeptide
RQTRIQILLSLLAGVPRERTA

SEQ ID NO: 16377 - protein, 20 aa, Artificial Sequence
  Synthetic polypeptide
ERPCGALGVRAAVWSSSVHL

SEQ ID NO: 16378 - protein, 411 aa, Artificial Sequence
  Synthetic polypeptide
GQLCGLAVFICSFMVAAPIFGYLGDRFNRKVILSCGIFFWSAVTFSSSFIPQQYFWLLVLSRGLVGIGEASYSTIAPTIIGDLFTKNTRTLMLSVFYFAIPLGSGLGYITGSSVKQAAGDWHWALRVSPVLGMITGTLILILVPATKRGHADQLGDQLKARTSWLRDMKALIRNRSYVFSSLATSAVSFATGALGMWIPLYLHRAQVVQKTAETCNSPPCGAKDSLIFGAITCFTGFLGVVTGAGATRWCRLKTQRADPLVCAVGMLGSAIFICLIFVAAKSSIVGAYICIFVGETLLFSNWAITADILMYVVIPTRRATAVALQSFTSHLLGDAGSPYLIGFISDLIRQSTKDSPLWEFLSLGYALMLCPFVVVLGGMFFLATALFFVSDRARAEQQVNQLAMPPASVKV

SEQ ID NO: 16379 - protein, 24 aa, Artificial Sequence
  Synthetic polypeptide
QCSSVASWWLPPSSATWATASTGR

SEQ ID NO: 16380 - protein, 85 aa, Artificial Sequence
  Synthetic polypeptide
PLNNIGLNCVDPFIYRHFSIKFTLNVPVPPASPFTSTSSSTSATLGPQDQPFLLLSLLNLKTRKMKALKIIHFHLLGPTSVPREV

SEQ ID NO: 16381 - protein, 495 aa, Artificial Sequence
  Synthetic polypeptide
QLTLEQHRLELCGSIYIQTLFNKIYTECACPSCLSFHLHLLFHLCHPRTARPTLPPPQPTQPEDKEDEGLEDYPLPLTRPNICTTRGVSSCQQCLAVSPMCAWCSDEALPLGSPRCDLKENLLKDNCAPESIEFPVSEARVLEDRPLSDKGSGDSSQVTQVSPQRIALRLRPDDSKNFSIQVRQVEDYPVDIYYLMDLSYSMKDDLWSIQNLGTKLATQMRKLTSNLRIGFGAFVDKPVSPYMYISPPEALENPCYDMKTTCLPMFGYKHVLTLTDQVTRFNEEVKKQSVSRNRDAPEGGFDAIMQATVCDEKIGWRNDASHLLVFTTDAKTHIALDGRLAGIVQPNDGQCHVGSDNHYSASTTMDYPSLGLMTEKLSQKNINLIFAVTENVVNLYQNYSELIPGTTVGVLSMDSSNVLQLIVDAYGKIRSKVELEVRDLPEELSLSFNATCLNNEVIPGLKSCMGLKIGDTVRWAGQGLCPGASVGTQPPFFLL

SEQ ID NO: 16382 - protein, 840 aa, Artificial Sequence
  Synthetic polypeptide
QLTLEQHRLELCGSIYIQTLFNKIYTECACPSCLSFHLHLLFHLCHPRTARPTLPPPQPTQPEDKEDEGLEDYPLPLTRPNICTTRGVSSCQQCLAVSPMCAWCSDEALPLGSPRCDLKENLLKDNCAPESIEFPVSEARVLEDRPLSDKGSGDSSQVTQVSPQRIALRLRPDDSKNFSIQVRQVEDYPVDIYYLMDLSYSMKDDLWSIQNLGTKLATQMRKLTSNLRIGFGAFVDKPVSPYMYISPPEALENPCYDMKTTCLPMFGYKHVLTLTDQVTRFNEEVKKQSVSRNRDAPEGGFDAIMQATVCDEKIGWRNDASHLLVFTTDAKTHIALDGRLAGIVQPNDGQCHVGSDNHYSASTTMDYPSLGLMTEKLSQKNINLIFAVTENVVNLYQNYSELIPGTTVGVLSMDSSNVLQLIVDAYGKIRSKVELEVRDLPEELSLSFNATCLNNEVIPGLKSCMGLKIGDTVSFSIEAKVRGCPQEKEKSFTIKPVGFKDSLIVQVTFDCDCACQAQAEPNSHRCNNGNGTFECGVCRCGPGWLGSQCECSEEDYRPSQQDECSPREGQPVCSQRGECLCGQCVCHSSDFGKITGKYCECDDFSCVRYKGEMCSGHGQCSCGDCLCDSDWTGYYCNCTTRTDTCMSSNGLLCSGRGKCECGSCVCIQPGSYGDTCEKCPTCPDACTFKKECVECKKFDRGALHDENTCNRYCRDEIESVKELKDTGKDAVNCTYKNEDDCVVRFQYYEDSSGKSILYVVEEPECPKGPDILVVLLSVMGAILLIGLAALLIWKLLITIHDRKEFAKFEEERARAKWDTANNPLYKEATSTFTNITYRGT

SEQ ID NO: 16383 - protein, 850 aa, Artificial Sequence
  Synthetic polypeptide
QLTLEQHRLELCGSIYIQTLFNKIYTECACPSCLSFHLHLLFHLCHPRTARPTLPPPQPTQPEDKEDEGLEDYPLPLTRPNICTTRGVSSCQQCLAVSPMCAWCSDEALPLGSPRCDLKENLLKDNCAPESIEFPVSEARVLEDRPLSDKGSGDSSQVTQVSPQRIALRLRPDDSKNFSIQVRQVEDYPVDIYYLMDLSYSMKDDLWSIQNLGTKLATQMRKLTSNLRIGFGAFVDKPVSPYMYISPPEALENPCYDMKTTCLPMFGYKHVLTLTDQVTRFNEEVKKQSVSRNRDAPEGGFDAIMQATVCDEKIGWRNDASHLLVFTTDAKTHIALDGRLAGIVQPNDGQCHVGSDNHYSASTTMDYPSLGLMTEKLSQKNINLIFAVTENVVNLYQNYSELIPGTTVGVLSMDSSNVLQLIVDAYGKIRSKVELEVRDLPEELSLSFNATCLNNEVIPGLKSCMGLKIGDTVSFSIEAKVRGCPQEKEKSFTIKPVGFKDSLIVQVTFDCDCACQAQAEPNSHRCNNGNGTFECGVCRCGPGWLGSQCECSEEDYRPSQQDECSPREGQPVCSQRGECLCGQCVCHSSDFGKITGKYCECDDFSCVRYKGEMCSGHGQCSCGDCLCDSDWTGYYCNCTTRTDTCMSSNGLLCSGRGKCECGSCVCIQPGSYGDTCEKCPTCPDACTFKKECVECKKFDRGALHDENTCNRYCRDEIESVKELKDTGKDAVNCTYKNEDDCVVRFQYYEDSSGKSILYVVEEPECPKGPDILVVLLSVMGAILLIGLAALLIWKLLITIHDRKEFAKFEEERARAKWDTEILLYYCSFILVHQSLESLRTEFTSKQKDGN

SEQ ID NO: 16384 - protein, 399 aa, Artificial Sequence
  Synthetic polypeptide
ELGRTAGGQQQALPLGSPRCDLKENLLKDNCAPESIEFPVSEARVLEDRPLSDKGSGDSSQVTQVSPQRIALRLRPDDSKNFSIQVRQVEDYPVDIYYLMDLSYSMKDDLWSIQNLGTKLATQMRKLTSNLRIGFGAFVDKPVSPYMYISPPEALENPCYDMKTTCLPMFGYKHVLTLTDQVTRFNEEVKKQSVSRNRDAPEGGFDAIMQATVCDEKIGWRNDASHLLVFTTDAKTHIALDGRLAGIVQPNDGQCHVGSDNHYSASTTMDYPSLGLMTEKLSQKNINLIFAVTENVVNLYQNYSELIPGTTVGVLSMDSSNVLQLIVDAYGKIRSKVELEVRDLPEELSLSFNATCLNNEVIPGLKSCMGLKIGDTVRWAGQGLCPGASVGTQPPFFLL

SEQ ID NO: 16385 - protein, 744 aa, Artificial Sequence
  Synthetic polypeptide
ELGRTAGGQQQALPLGSPRCDLKENLLKDNCAPESIEFPVSEARVLEDRPLSDKGSGDSSQVTQVSPQRIALRLRPDDSKNFSIQVRQVEDYPVDIYYLMDLSYSMKDDLWSIQNLGTKLATQMRKLTSNLRIGFGAFVDKPVSPYMYISPPEALENPCYDMKTTCLPMFGYKHVLTLTDQVTRFNEEVKKQSVSRNRDAPEGGFDAIMQATVCDEKIGWRNDASHLLVFTTDAKTHIALDGRLAGIVQPNDGQCHVGSDNHYSASTTMDYPSLGLMTEKLSQKNINLIFAVTENVVNLYQNYSELIPGTTVGVLSMDSSNVLQLIVDAYGKIRSKVELEVRDLPEELSLSFNATCLNNEVIPGLKSCMGLKIGDTVSFSIEAKVRGCPQEKEKSFTIKPVGFKDSLIVQVTFDCDCACQAQAEPNSHRCNNGNGTFECGVCRCGPGWLGSQCECSEEDYRPSQQDECSPREGQPVCSQRGECLCGQCVCHSSDFGKITGKYCECDDFSCVRYKGEMCSGHGQCSCGDCLCDSDWTGYYCNCTTRTDTCMSSNGLLCSGRGKCECGSCVCIQPGSYGDTCEKCPTCPDACTFKKECVECKKFDRGALHDENTCNRYCRDEIESVKELKDTGKDAVNCTYKNEDDCVVRFQYYEDSSGKSILYVVEEPECPKGPDILVVLLSVMGAILLIGLAALLIWKLLITIHDRKEFAKFEEERARAKWDTANNPLYKEATSTFTNITYRGT

SEQ ID NO: 16386 - protein, 754 aa, Artificial Sequence
  Synthetic polypeptide
ELGRTAGGQQQALPLGSPRCDLKENLLKDNCAPESIEFPVSEARVLEDRPLSDKGSGDSSQVTQVSPQRIALRLRPDDSKNFSIQVRQVEDYPVDIYYLMDLSYSMKDDLWSIQNLGTKLATQMRKLTSNLRIGFGAFVDKPVSPYMYISPPEALENPCYDMKTTCLPMFGYKHVLTLTDQVTRFNEEVKKQSVSRNRDAPEGGFDAIMQATVCDEKIGWRNDASHLLVFTTDAKTHIALDGRLAGIVQPNDGQCHVGSDNHYSASTTMDYPSLGLMTEKLSQKNINLIFAVTENVVNLYQNYSELIPGTTVGVLSMDSSNVLQLIVDAYGKIRSKVELEVRDLPEELSLSFNATCLNNEVIPGLKSCMGLKIGDTVSFSIEAKVRGCPQEKEKSFTIKPVGFKDSLIVQVTFDCDCACQAQAEPNSHRCNNGNGTFECGVCRCGPGWLGSQCECSEEDYRPSQQDECSPREGQPVCSQRGECLCGQCVCHSSDFGKITGKYCECDDFSCVRYKGEMCSGHGQCSCGDCLCDSDWTGYYCNCTTRTDTCMSSNGLLCSGRGKCECGSCVCIQPGSYGDTCEKCPTCPDACTFKKECVECKKFDRGALHDENTCNRYCRDEIESVKELKDTGKDAVNCTYKNEDDCVVRFQYYEDSSGKSILYVVEEPECPKGPDILVVLLSVMGAILLIGLAALLIWKLLITIHDRKEFAKFEEERARAKWDTEILLYYCSFILVHQSLESLRTEFTSKQKDGN

SEQ ID NO: 16387 - protein, 26 aa, Artificial Sequence
  Synthetic polypeptide
LVHGLLGTGPHSRRSAAGPASGLTSL

SEQ ID NO: 16388 - protein, 27 aa, Artificial Sequence
  Synthetic polypeptide
SPWPVRNWAAQQEVSSRPCLWAHLAVT

SEQ ID NO: 16389 - protein, 365 aa, Artificial Sequence
  Synthetic polypeptide
MCDLGQVTSLGHSFLTSNGRAPSPRCRAVMITKGKLHGSIDVRLSVMSINKKAQRIDLDTEDNIYHLKIKSQDLFQSWVAQLRAHRLAHRLDMPRGSLPSTAHRKVPGAQLPTAATASALPGLGPREKVSSWLRDSDGLDRCSHELSECQGKLQELHRLLQSLESLHRIPSAPVIPTHQASVTTERPKKGKRTSRMWCTQSFAKDDTIGRVGRLHGSVPNLSRYLESRDSSGTRGLPPTDYAHLQRSFWALAQKVHSSLSSVLAALTMERDQLRDMHQGSELSRMGVSEASTGQRRLHSLSTSSDTTADSFSSLNPEEQEALYMKGRELTPQLSQTSILSLADSHTEFFDACEVLLSASSSENEG

SEQ ID NO: 16390 - protein, 787 aa, Artificial Sequence
  Synthetic polypeptide
MCDLGQVTSLGHSFLTSNGRAPSPRCRAVMITKGKLHGSIDVRLSVMSINKKAQRIDLDTEDNIYHLKIKSQDLFQSWVAQLRAHRLAHRLDMPRGSLPSTAHRKVPGAQLPTAATASALPGLGPREKVSSWLRDSDGLDRCSHELSECQGKLQELHRLLQSLESLHRIPSAPVIPTHQASVTTERPKKGKRTSRMWCTQSFAKDDTIGRVGRLHGSVPNLSRYLESRDSSGTRGLPPTDYAHLQRSFWALAQKVHSSLSSVLAALTMERDQLRDMHQGSELSRMGVSEASTGQRRLHSLSTSSDTTADSFSSLNPEEQEALYMKGRELTPQLSQTSILSLADSHTEFFDACEVLLSASSSENEGSEEEESCTSEITTSLSEEMLDLRGAERCQKGGCVPGRPMGPPRRRCLPAASGPGADVSLWNILRNNIGKDLSKVSMPVQLNEPLNTLQRLCEELEYSSLLDQASRIADPCERMVYIAAFAVSAYSSTYHRAGCKPFNPVLGETYECERPDRGFRFISEQVSHHPPISACHAESENFAFWQDMKWKNKFWGKSLEIVPVGTVNVSLPRFGDHFEWNKVTSCIHNVLSGQRWIEHYGEVLIRNTQDSSCHCKITFCKAKYWSSNVHEVQGAVLSRSGRVLHRLFGKWHEGLYRGPTPGGQCIWKPNSMPPDHERNFGFTQFALELNELTAELKRSLPSTDTRLRPDQRYLEEGNIQAAEAQKRRIEQLQRDRRKVMEENNIVHQARFFRRQTDSSGKEWWVTNNTYWRLRAEPGYGNMDGAVLW

SEQ ID NO: 16391 - protein, 38 aa, Artificial Sequence
  Synthetic polypeptide
WESTIPQVQSCHDHQGEAPWLHRCPAVGHVHQQKGPAH

SEQ ID NO: 16392 - protein, 61 aa, Artificial Sequence
  Synthetic polypeptide
HSKTWHLGNYENSRKCGHAYSGIVAHQKHLLPTSPPISQASEGASSDIHTPAQMLLSTLQS

SEQ ID NO: 16393 - protein, 168 aa, Artificial Sequence
  Synthetic polypeptide
HSKTWHLGNYENSRKCGHAYSGIVAHQKHLLPTSPPISQASEGASSDIHTPAQMLLSTLQSTQRPTLPVGSLSSDKELTRPNETTIHTAGHSLAAGPEAGENQKQPEKNAGPTARTSATVPVLCLLAIIFILTAALSYVLCKRRRGQSPQSSPDLPVHYIPVAPDSNT

SEQ ID NO: 16394 - protein, 53 aa, Artificial Sequence
  Synthetic polypeptide
LRKQQKMWTCLLGDCGPPEAFTSYQPPNFSGLRGGIFRYPHPCPDAPVHLAVH

SEQ ID NO: 16395 - protein, 73 aa, Artificial Sequence
  Synthetic polypeptide
LRKQQKMWTCLLGDCGPPEAFTSYQPPNFSGLRGGIFRYPHPCPDAPVHLAVHSAPHPPSRITVLGQRAHSSQ

SEQ ID NO: 16396 - protein, 66 aa, Artificial Sequence
  Synthetic polypeptide
SSEHDTPKHGTLVITKTAENVDMLTRGLWPTRSIYFLPAPQFLRPQRGHLQISTPLPRCSCPPCSP

SEQ ID NO: 16397 - protein, 73 aa, Artificial Sequence
  Synthetic polypeptide
SSEHDTPKHGTLVITKTAENVDMLTRGLWPTRSIYFLPAPQFLRPQRGHLQISTPLPRCSCPPCSPLSAPPSQ

SEQ ID NO: 16398 - protein, 103 aa, Artificial Sequence
  Synthetic polypeptide
RSSKNAPPMKLRTRLHLNLLMLKSFWQKVCGMRTSALLQGITETIFYGAFSKSKPGTIGIFSPKGETLDRTALMIITAGLLACPSHPMHPFCQIIRMREWKTS

SEQ ID NO: 16399 - protein, 100 aa, Artificial Sequence
  Synthetic polypeptide
RSSKNAPPMKLRTRLHLNLLMLKSFWQKVCGMRTSALLQGITETIFYGAFSKSKPGTIGIFSPKGETLDRTALMIITAGLLACPSHPMHPFCQIIRMRVF

SEQ ID NO: 16400 - protein, 162 aa, Artificial Sequence
  Synthetic polypeptide
SECLCPFKIHKLKSNPQCNILRGRAFRRRLSHDGGALYLCKRGPRELVHSFHHVKKQQECTTYEAENTPSSESADAEEFLAEGLRNENLSAVARDHRDHILRGFQQIKARYYWDFQPQGGDIGQDSSDDNHSGTLGLSLTSDAPFLSDYQDEGILRRMNRRV

SEQ ID NO: 16401 - protein, 418 aa, Artificial Sequence
  Synthetic polypeptide
SECLCPFKIHKLKSNPQCNILRGRAFRRRLSHDGGALYLCKRGPRELVHSFHHVKKQQECTTYEAENTPSSESADAEEFLAEGLRNENLSAVARDHRDHILRGFQQIKARYYWDFQPQGGDIGQDSSDDNHSGTLGLSLTSDAPFLSDYQDEGMEDIVKGAQELDNVIKQGYLEKKSKDHSFFGSEWQKRWCVVSRGLFYYYANEKSKQPKGTFLIKGYGVRMAPHLRRDSKKESCFELTSQDRRSYEFTATSPAEARDWVDQISFLLKDLSSLTIPYEEDEEEEEKEETYDDIDGFDSPSCGSQCRPTILPGSVGIKEPTEEKEEEDIYEVLPDEEHDLEEDESGTRRKGVDYASYYQGLWDCHGDQPDELSFQRGDLIRILSKEYNMYGWWVGELNSLVGIVPKEYLTTAFEVEER

SEQ ID NO: 16402 - protein, 56 aa, Artificial Sequence
  Synthetic polypeptide
GQARWLTPIIPALWKAKAGGSQGLAISGPLVSRDSGELHPQCLPAHHQGEPALPLH

SEQ ID NO: 16403 - protein, 70 aa, Artificial Sequence
  Synthetic polypeptide
PGTVAHAYNPSTLEGQGRRITRSCDQWTAGQQGLWRTPSSMPTCTPSGRASTSSTLRISSSLAAQMGGRF

SEQ ID NO: 16404 - protein, 341 aa, Artificial Sequence
  Synthetic polypeptide
SQHFGRPRQADHKVLRSVDRWSAGTLENSILNAYLHTIRESQHFLYIENQFFISCSDGRTVLNKVGDEIVDRILKAHKQGWCYRVYVLLPLLPGFEGDISTGGGNSIQAILHFTYRTLCRGEYSILHRLKAAMGTAWRDYISICGLRTHGELGGHPVSELIYIHSKVLIADDRTVIIGSANINDRSLLGKRDSELAVLIEDTETEPSLMNGAEYQAGRFALSLRKHCFGVILGANTRPDLDLRDPICDDFFQLWQDMAESNANIYEQIFRCLPSNATRSLRTLREYVAVEPLATVSPPLARSELTQVQGHLVHFPLKFLEDESLLPPLGSKEGMIPLEVWT

SEQ ID NO: 16405 - protein, 330 aa, Artificial Sequence
  Synthetic polypeptide
SQHFGRPRQADHKVLRSVDRWSAGTLENSILNAYLHTIRESQHFLYIENQFFISCSDGRTVLNKVGDEIVDRILKAHKQGWCYRVYVLLPLLPGFEGDISTGGGNSIQAILHFTYRTLCRGEYSILHRLKAAMGTAWRDYISICGLRTHGELGGHPVSELIYIHSKVLIADDRTVIIGSANINDRSLLGKRDSELAVLIEDTETEPSLMNGAEYQAGSVILGANTRPDLDLRDPICDDFFQLWQDMAESNANIYEQIFRCLPSNATRSLRTLREYVAVEPLATVSPPLARSELTQVQGHLVHFPLKFLEDESLLPPLGSKEGMIPLEVWT

SEQ ID NO: 16406 - protein, 361 aa, Artificial Sequence
  Synthetic polypeptide
GQARWLTPIIPALWKAKAGGSQGPEIETILANMVLRSVDRWSAGTLENSILNAYLHTIRESQHFLYIENQFFISCSDGRTVLNKVGDEIVDRILKAHKQGWCYRVYVLLPLLPGFEGDISTGGGNSIQAILHFTYRTLCRGEYSILHRLKAAMGTAWRDYISICGLRTHGELGGHPVSELIYIHSKVLIADDRTVIIGSANINDRSLLGKRDSELAVLIEDTETEPSLMNGAEYQAGRFALSLRKHCFGVILGANTRPDLDLRDPICDDFFQLWQDMAESNANIYEQIFRCLPSNATRSLRTLREYVAVEPLATVSPPLARSELTQVQGHLVHFPLKFLEDESLLPPLGSKEGMIPLEVWT

SEQ ID NO: 16407 - protein, 350 aa, Artificial Sequence
  Synthetic polypeptide
GQARWLTPIIPALWKAKAGGSQGPEIETILANMVLRSVDRWSAGTLENSILNAYLHTIRESQHFLYIENQFFISCSDGRTVLNKVGDEIVDRILKAHKQGWCYRVYVLLPLLPGFEGDISTGGGNSIQAILHFTYRTLCRGEYSILHRLKAAMGTAWRDYISICGLRTHGELGGHPVSELIYIHSKVLIADDRTVIIGSANINDRSLLGKRDSELAVLIEDTETEPSLMNGAEYQAGSVILGANTRPDLDLRDPICDDFFQLWQDMAESNANIYEQIFRCLPSNATRSLRTLREYVAVEPLATVSPPLARSELTQVQGHLVHFPLKFLEDESLLPPLGSKEGMIPLEVWT

SEQ ID NO: 16408 - protein, 35 aa, Artificial Sequence
  Synthetic polypeptide
HGLAISGPLVSRDSGELHPQCLPAHHQGEPALPLH

SEQ ID NO: 16409 - protein, 72 aa, Artificial Sequence
  Synthetic polypeptide
SQHFGRPRQADHKVRRSRPSWLTWSCDQWTAGQQGLWRTPSSMPTCTPSGRASTSSTLRISSSLAAQMGGRF

SEQ ID NO: 16410 - protein, 359 aa, Artificial Sequence
  Synthetic polypeptide
ESVTFSDVVSATEPCKPCTECVGLQSMSAPCVEADDAVCRCAYGYYQDETTGRCEACRVCEAGSGLVFSCQDKQNTVCEECPDGTYSDEANHVDPCLPCTVCEDTERQLRECTRWADAECEEIPGRWITRSTPPEGSDSTAPSTQEPEAPPEQDLIASTVAGVVTTVMGSSQPVVTRGTTDNLIPVYCSILAAVVVGLVAYIAFKRWNSCKQNKQGANSRPVNQTPPPEGEKLHSDSGISVDSQSLHDQQPHTQTASGQALKGDGGLYSSLPPAKREEVEKLLNGSAGDTWRHLAGELGYQPEHIDSFTHEACPVRALLASWATQDSATLDALLAALRRIQRADLVESLCSESTATSPV

SEQ ID NO: 16411 - protein, 15 aa, Artificial Sequence
  Synthetic polypeptide
LCSLCTAQQYPSERA

SEQ ID NO: 16412 - protein, 62 aa, Artificial Sequence; identical to SEQ ID NO: 4600
  Synthetic polypeptide

SEQ ID NO: 16413 - protein, 40 aa, Artificial Sequence
  Synthetic polypeptide
DNIGSWLVPPGSSLCPMATPTGLVLCTCAHSLPTRMTVSG

SEQ ID NO: 16414 - protein, 75 aa, Artificial Sequence
  Synthetic polypeptide
HRLLAGAPRELAVPDGYTNRTGAVYLCPLTAHKDDCERMNITVKNDPGHHIIEDMWLGVTVASQGPAGRVLETAT

SEQ ID NO: 16415 - protein, 999 aa, Artificial Sequence
  Synthetic polypeptide
HRLLAGAPRELAVPDGYTNRTGAVYLCPLTAHKDDCERMNITVKNDPGHHIIEDMWLGVTVASQGPAGRVLVCAHRYTQVLWSGSEDQRRMVGKCYVRGNDLELDSSDDWQTYHNEMCNSNTDYLETGMCQLGTSGGFTQNTVYFGAPGAYNWKGNSYMIQRKEWDLSEYSYKDPEDQGNLYIGYTMQVGSFILHPKNITIVTGAPRHRHMGAVFLLSQEAGGDLRRRQVLEGSQVGAYFGSAIALADLNNDGWQDLLVGAPYYFERKEEVGGAIYVFMNQAGTSFPAHPSLLLHGPSGSAFGLSVASIGDINQDGFQDIAVGAPFEGLGKVYIYHSSSKGLLRQPQQVIHGEKLGLPGLATFGYSLSGQMDVDENFYPDLLVGSLSDHIVLLRARPVINIVHKTLVPRPAVLDPALCTATSCVQVELCFAYNQSAGNPNYRRNITLAYTLEADRDRRPPRLRFAGSESAVFHGFFSMPEMRCQKLELLLMDNLRDKLRPIIISMNYSLPLRMPDRPRLGLRSLDAYPILNQAQALENHTEVQFQKECGPDNKCESNLQMRAAFVSEQQQKLSRLQYSRDVRKLLLSINVTNTRTSERSGEDAHEALLTLVVPPALLLSSVRPPGACQANETIFCELGNPFKRNQRMELLIAFEVIGVTLHTRDLQVQLQLSTSSHQDNLWPMILTLLVDYTLQTSLSMVNHRLQSFFGGTVMGESGMKTVEDVGSPLKYEFQVGPMGEGLVGLGTLVLGLEWPYEVSNGKWLLYPTEITVHGNGSWPCRPPGDLINPLNLTLSDPGDRPSSPQRRRRQLDPGGGQGPPPVTLAAAKKAKSETVLTCATGRAHCVWLECPIPDAPVVTNVTVKARVWNSTFIEDYRDFDRVRVNGWATLFLRTSIPTINMENKTTWFSVDIDSELVEELPAEIELWLVLVAVGAGLLLLGLIILLLWKCDFFKRTRYYQIMPKYHAVRIREEERYPPPGSTLPTKKHWVTSWQTRDQYY

SEQ ID NO: 16416 - protein, 984 aa, Artificial Sequence
  Synthetic polypeptide
HRLLAGAPRELAVPDGYTNRTGAVYLCPLTAHKDDCERMNITVKNDPGHHIIEDMWLGVTVASQGPAGRVLVCAHRYTQVLWSGSEDQRRMVGKCYVRGNDLELDSSDDWQTYHNEMCNSNTDYLETGMCQLGTSGGFTQNTVYFGAPGAYNWKGNSYMIQRKEWDLSEYSYKDPEDQGNLYIGYTMQVGSFILHPKNITIVTGAPRHRHMGAVFLLSQEAGGDLRRRQVLEGSQVGAYFGSAIALADLNNDGWQDLLVGAPYYFERKEEVGGAIYVFMNQAGTSFPAHPSLLLHGPSGSAFGLSVASIGDINQDGFQDIAVGAPFEGLGKVYIYHSSSKGLLRQPQQVIHGEKLGLPGLATFGYSLSGQMDVDENFYPDLLVGSLSDHIVLLRARPVINIVHKTLVPRPAVLDPALCTATSCVQVELCFAYNQSAGNPNYRRNITLAYTLEADRDRRPPRLRFAGSESAVFHGFFSMPEMRCQKLELLLMDNLRDKLRPIIISMNYSLPLRMPDRPRLGLRSLDAYPILNQAQALENHTEVQFQKECGPDNKCESNLQMRAAFVSEQQQKLSRLQYSRDVRKLLLSINVTNTRTSERSGEDAHEALLTLVVPPALLLSSVRPPGACQANETIFCELGNPFKRNQRMELLIAFEVIGVTLHTRDLQVQLQLSTSSHQDNLWPMILTLLVDYTLQTSLSMVNHRLQSFFGGTVMGESGMKTVEDVGSPLKYEFQVGPMGEGLVGLGTLVLGLEWPYEVSNGKWLLYPTEITVHGNGSWPCRPPGDLINPLNLTLSDPGDRPSSPQRRRRQLDPGGGQGPPPVTLAAAKKAKSETVLTCATGRAHCVWLECPIPDAPVVTNVTVKARVWNSTFIEDYRDFDRVRVNGWATLFLRTSIPTINMENKTTWFSVDIDSELVEELPAEIELWLVLVAVGAGLLLLGLIILLLWKCGFFKRARTRALYEAKRQKAEMKSQPSETERLTDDY

SEQ ID NO: 16417 - protein, 23 aa, Artificial Sequence
  Synthetic polypeptide
LRTKRKAKEPLKTQNRYCCGSSV

SEQ ID NO: 16418 - protein, 80 aa, Artificial Sequence; identical to SEQ ID NO: 3944
  Synthetic polypeptide

SEQ ID NO: 16419 - protein, 102 aa, Artificial Sequence; identical to SEQ ID NO: 3593
  Synthetic polypeptide

SEQ ID NO: 16420 - protein, 138 aa, Artificial Sequence; identical to SEQ ID NO: 3189
  Synthetic polypeptide

SEQ ID NO: 16421 - protein, 685 aa, Artificial Sequence; identical to SEQ ID NO: 1791
  Synthetic polypeptide

SEQ ID NO: 16422 - protein, 670 aa, Artificial Sequence; identical to SEQ ID NO: 1806
  Synthetic polypeptide

SEQ ID NO: 16423 - protein, 87 aa, Artificial Sequence
  Synthetic polypeptide
ALSDPKLQTGKNIAVGAPFEGLGKVYIYHSSSKGLLRQPQQVIHGEKLGLPGLATFGYSLSGQMDVDENFYPDLLVGSLSDHIVLLR

SEQ ID NO: 16424 - protein, 109 aa, Artificial Sequence
  Synthetic polypeptide
ALSDPKLQTGKNIAVGAPFEGLGKVYIYHSSSKGLLRQPQQVIHGEKLGLPGLATFGYSLSGQMDVDENFYPDLLVGSLSDHIVLLRARPVINIVHKTLVPRPAVLDPA

SEQ ID NO: 16425 - protein, 145 aa, Artificial Sequence
  Synthetic polypeptide
ALSDPKLQTGKNIAVGAPFEGLGKVYIYHSSSKGLLRQPQQVIHGEKLGLPGLATFGYSLSGQMDVDENFYPDLLVGSLSDHIVLLRARPVINIVHKTLVPRPAVLDPALCTATSCVQVELCFAYNQSAGNPNYRRNISECWGAA

SEQ ID NO: 16426 - protein, 692 aa, Artificial Sequence
  Synthetic polypeptide
ALSDPKLQTGKNIAVGAPFEGLGKVYIYHSSSKGLLRQPQQVIHGEKLGLPGLATFGYSLSGQMDVDENFYPDLLVGSLSDHIVLLRARPVINIVHKTLVPRPAVLDPALCTATSCVQVELCFAYNQSAGNPNYRRNITLAYTLEADRDRRPPRLRFAGSESAVFHGFFSMPEMRCQKLELLLMDNLRDKLRPIIISMNYSLPLRMPDRPRLGLRSLDAYPILNQAQALENHTEVQFQKECGPDNKCESNLQMRAAFVSEQQQKLSRLQYSRDVRKLLLSINVTNTRTSERSGEDAHEALLTLVVPPALLLSSVRPPGACQANETIFCELGNPFKRNQRMELLIAFEVIGVTLHTRDLQVQLQLSTSSHQDNLWPMILTLLVDYTLQTSLSMVNHRLQSFFGGTVMGESGMKTVEDVGSPLKYEFQVGPMGEGLVGLGTLVLGLEWPYEVSNGKWLLYPTEITVHGNGSWPCRPPGDLINPLNLTLSDPGDRPSSPQRRRRQLDPGGGQGPPPVTLAAAKKAKSETVLTCATGRAHCVWLECPIPDAPVVTNVTVKARVWNSTFIEDYRDFDRVRVNGWATLFLRTSIPTINMENKTTWFSVDIDSELVEELPAEIELWLVLVAVGAGLLLLGLIILLLWKCDFFKRTRYYQIMPKYHAVRIREEERYPPPGSTLPTKKHWVTSWQTRDQYY

SEQ ID NO: 16427 - protein, 677 aa, Artificial Sequence
  Synthetic polypeptide
ALSDPKLQTGKNIAVGAPFEGLGKVYIYHSSSKGLLRQPQQVIHGEKLGLPGLATFGYSLSGQMDVDENFYPDLLVGSLSDHIVLLRARPVINIVHKTLVPRPAVLDPALCTATSCVQVELCFAYNQSAGNPNYRRNITLAYTLEADRDRRPPRLRFAGSESAVFHGFFSMPEMRCQKLELLLMDNLRDKLRPIIISMNYSLPLRMPDRPRLGLRSLDAYPILNQAQALENHTEVQFQKECGPDNKCESNLQMRAAFVSEQQQKLSRLQYSRDVRKLLLSINVTNTRTSERSGEDAHEALLTLVVPPALLLSSVRPPGACQANETIFCELGNPFKRNQRMELLIAFEVIGVTLHTRDLQVQLQLSTSSHQDNLWPMILTLLVDYTLQTSLSMVNHRLQSFFGGTVMGESGMKTVEDVGSPLKYEFQVGPMGEGLVGLGTLVLGLEWPYEVSNGKWLLYPTEITVHGNGSWPCRPPGDLINPLNLTLSDPGDRPSSPQRRRRQLDPGGGQGPPPVTLAAAKKAKSETVLTCATGRAHCVWLECPIPDAPVVTNVTVKARVWNSTFIEDYRDFDRVRVNGWATLFLRTSIPTINMENKTTWFSVDIDSELVEELPAEIELWLVLVAVGAGLLLLGLIILLLWKCGFFKRARTRALYEAKRQKAEMKSQPSETERLTDDY

SEQ ID NO: 16428 - protein, 44 aa, Artificial Sequence
  Synthetic polypeptide
FPRPYLIQSCKLERILLWELRLKAWAKCTSITVALRGSLDSPSR

SEQ ID NO: 16429 - protein, 15 aa, Artificial Sequence
  Synthetic polypeptide
SKAANWKEYCCGSSV

SEQ ID NO: 16430 - protein, 12 aa, Artificial Sequence
  Synthetic polypeptide
GSQSWPHVLCGH

SEQ ID NO: 16431 - protein, 100 aa, Artificial Sequence
  Synthetic polypeptide
VLNLGHTFSVDIDSELVEELPAEIELWLVLVAVGAGLLLLGLIILLLWKCDFFKRTRYYQIMPKYHAVRIREEERYPPPGSTLPTKKHWVTSWQTRDQYY

SEQ ID NO: 16432 - protein, 85 aa, Artificial Sequence
  Synthetic polypeptide
VLNLGHTFSVDIDSELVEELPAEIELWLVLVAVGAGLLLLGLIILLLWKCGFFKRARTRALYEAKRQKAEMKSQPSETERLTDDY

SEQ ID NO: 16433 - protein, 42 aa, Artificial Sequence
  Synthetic polypeptide
WFSILATRSLWTLTRSWWRSCRPKSSCGWCWWPWVQGCCCWG

SEQ ID NO: 16434 - protein, 21 aa, Artificial Sequence
  Synthetic polypeptide
PGMVAHACNPSTLGGRVLCGH

SEQ ID NO: 16435 - protein, 109 aa, Artificial Sequence; identical to SEQ ID NO: 3501
  Synthetic polypeptide

SEQ ID NO: 16436 - protein, 94 aa, Artificial Sequence; identical to SEQ ID NO: 3697
  Synthetic polypeptide

SEQ ID NO: 16437 - protein, 42 aa, Artificial Sequence; identical to SEQ ID NO: 5607
  Synthetic polypeptide

SEQ ID NO: 16438 - protein, 35 aa, Artificial Sequence
  Synthetic polypeptide
CSLWTLTRSWWRSCRPKSSCGWCWWPWVQGCCCWG

SEQ ID NO: 16439 - protein, 19 aa, Artificial Sequence
  Synthetic polypeptide
NLISTKNTKLARRDVLCGH

SEQ ID NO: 16440 - protein, 97 aa, Artificial Sequence; identical to SEQ ID NO: 3660
  Synthetic polypeptide

SEQ ID NO: 16441 - protein, 82 aa, Artificial Sequence; identical to SEQ ID NO: 3910
  Synthetic polypeptide

SEQ ID NO: 16442 - protein, 51 aa, Artificial Sequence
  Synthetic polypeptide
GQEFKTSLNNIHPDGPPLHHPREHRGAAADGGQPRGAPATLHPAHVQCAHR

SEQ ID NO: 16443 - protein, 74 aa, Artificial Sequence
  Synthetic polypeptide
GQEFKTSLNNIHPDGPPLHHPREHRGAAADGGQPRGAPATLHPAHVQCAHSGSRSSPDFILPSLSTPRVAHPTC

SEQ ID NO: 16444 - protein, 65 aa, Artificial Sequence
  Synthetic polypeptide
SQHFGRQRQEGPLRPGVQDQPEQHTSRWSTTAPSTGTQRSCGRWRPAARCPGHSPPCPCSMCTQV

SEQ ID NO: 16445 - protein, 84 aa, Artificial Sequence
  Synthetic polypeptide
SQHFGRQRQEGPLRPGVQDQPEQHTSRWSTTAPSTGTQRSCGRWRPAARCPGHSPPCPCSMCTQVSGCLPAWTAPRCPSFWTST

SEQ ID NO: 16446 - protein, 70 aa, Artificial Sequence
  Synthetic polypeptide
SQHFGRQRQEGPLRPGVQDQPEQHTSRWSTTAPSTGTQRSCGRWRPAARCPGHSPPCPCSMCTQWFQVQP

SEQ ID NO: 16447 - protein, 43 aa, Artificial Sequence
  Synthetic polypeptide
TTYIQMVHHCTIHGNTEELRQMAASREVPRPLSTLPMFNVHTG

SEQ ID NO: 16448 - protein, 62 aa, Artificial Sequence
  Synthetic polypeptide
TTYIQMVHHCTIHGNTEELRQMAASREVPRPLSTLPMFNVHTGERLPPRVDSAQVPLILDQH

SEQ ID NO: 16449 - protein, 88 aa, Artificial Sequence
  Synthetic polypeptide
TTYIQMVHHCTIHGNTEELRQMAASREVPRPLSTLPMFNVHTVVPGPALTSSSLLCPHHEWHIPPADSSSWPSWNPGSKQAGRGGGVG

SEQ ID NO: 16450 - protein, 108 aa, Artificial Sequence
  Synthetic polypeptide
ARTPTCLCTQKTRTSLPASRTPCWPGCPASTCGSPCPATCSTCGTIVVATSSSPTCPSSRWSWVSCCGASPGRTFFTPSMAWSMAGPLPLFSLSPPWWWGSPCCWPPC

SEQ ID NO: 16451 - protein, 497 aa, Artificial Sequence
  Synthetic polypeptide
GQDSNLSVHTENPDLTPCFQNSLLAWVPCIYLWVALPCYLLYLRHHCRGYIILSHLSKLKMVLGVLLWCVSWADLFYSFHGLVHGRAPAPVFFVTPLVVGVTMLLATLLIQYERLQGVQSSGVLIIFWFLCVVCAIVPFRSKILLAKAEGEISDPFRFTTFYIHFALVLSALILACFREKPPFFSAKNVDPNPYPETSAGFLSRLFFWWFTKLLNPDPLRGCLPGFTSPQDGHLWLPASPGGEGPLVPKGRGQIPDGGAAAAGGMEEAGKADGTTQGFSSTWEKCLRRGRGAAGCPAQAPEALLPEGPAGHLRLQLPHQCLLQAYPGPALLHQSTAAQHPDQVYLQPHGPLLVGLPGGWADVPVLHDAVADLTTLLPLHLCDWGEVSYWDHGCHLQEGSGYHQLSQTCVHCGGNCQPHVSGCPALHGPCPLPQSAVVSTPADHPGDLLPLAEPRSLCPGWSRFHGLADSTQRSCGREDARLPGKANEIEGLAHQADE

SEQ ID NO: 16452 - protein, 559 aa, Artificial Sequence
  Synthetic polypeptide
GQDSNLSVHTENPDLTPCFQNSLLAWVPCIYLWVALPCYLLYLRHHCRGYIILSHLSKLKMVLGVLLWCVSWADLFYSFHGLVHGRAPAPVFFVTPLVVGVTMLLATLLIQYERLQGVQSSGVLIIFWFLCVVCAIVPFRSKILLAKAEGEISDPFRFTTFYIHFALVLSALILACFREKPPFFSAKNVDPNPYPETSAGFLSRLFFWWFTKMAIYGYRHPLEEKDLWSLKEEDRSQMVVQQLLEAWRKQEKQTARHKASAAPGKNASGEDEVLLGARPRPRKPSFLKALLATFGSSFLISACFKLIQDLLSFINPQLLSILIRFISNPMAPSWWGFLVAGLMFLCSMMQSLILQHYYHYIFVTGVKFRTGIMGVIYRKALVITNSVKRASTVGEIVNLMSVDAQRFMDLAPFLNLLWSAPLQIILAIYFLWQNLGPSVLAGVAFMVLLIPLNGAVAVKMRAFQVKQMKLKDSRIKLMSEILNGIKVLKLYAWEPSFLKQVEGIRQGELQLLRTAAYLHTTTTFTWMCSPFLVRLGTGLGPCLQGSGCPGMARAHWTLP

SEQ ID NO: 16453 - protein, 1225 aa, Artificial Sequence
  Synthetic polypeptide
GQDSNLSVHTENPDLTPCFQNSLLAWVPCIYLWVALPCYLLYLRHHCRGYIILSHLSKLKMVLGVLLWCVSWADLFYSFHGLVHGRAPAPVFFVTPLVVGVTMLLATLLIQYERLQGVQSSGVLIIFWFLCVVCAIVPFRSKILLAKAEGEISDPFRFTTFYIHFALVLSALILACFREKPPFFSAKNVDPNPYPETSAGFLSRLFFWWFTKMAIYGYRHPLEEKDLWSLKEEDRSQMVVQQLLEAWRKQEKQTARHKASAAPGKNASGEDEVLLGARPRPRKPSFLKALLATFGSSFLISACFKLIQDLLSFINPQLLSILIRFISNPMAPSWWGFLVAGLMFLCSMMQSLILQHYYHYIFVTGVKFRTGIMGVIYRKALVITNSVKRASTVGEIVNLMSVDAQRFMDLAPFLNLLWSAPLQIILAIYFLWQNLGPSVLAGVAFMVLLIPLNGAVAVKMRAFQVKQMKLKDSRIKLMSEILNGIKVLKLYAWEPSFLKQVEGIRQGELQLLRTAAYLHTTTTFTWMCSPFLVTLITLWVYVYVDPNNVLDAEKAFVSVSLFNILRLPLNMLPQLISNLTQASVSLKRIQQFLSQEELDPQSVERKTISPGYAITIHSGTFTWAQDLPPTLHSLDIQVPKGALVAVVGPVGCGKSSLVSALLGEMEKLEGKVHMKGSVAYVPQQAWIQNCTLQENVLFGKALNPKRYQQTLEACALLADLEMLPGGDQTEIGEKGINLSGGQRQRVSLARAVYSDADIFLLDDPLSAVDSHVAKHIFDHVIGPEGVLAGKTRVLVTHGISFLPQTDFIIVLADGQVSEMGPYPALLQRNGSFANFLCNYAPDEDQGHLEDSWTALEGAEDKEALLIEDTLSNHTDLTDNDPVTYVVQKQFMRQLSALSSDGEGQGRPVPRRHLGPSEKVQVTEAKADGALTQEEKAAIGTVELSVFWDYAKAVGLCTTLAICLLYVGQSAAAIGANVWLSAWTNDAMADSRQNNTSLRLGVYAALGILQGFLVMLAAMAMAAGGIQAARVLHQALLHNKIRSPQSFFDTTPSGRILNCFSKDIYVVDEVLAPVILMLLNSFFNAISTLVVIMASTPLFTVVILPLAVLYTLVQRFYAATSRQLKRLESVSRSPIYSHFSETVTGASVIRAYNRSRDFEIISDTKVDANQRSCYPYIISNRSEAASLAPCSSRNSQQALWCSGSLSLLSPKQKTGPALPLPHFLLI

SEQ ID NO: 16454 - protein, 1514 aa, Artificial Sequence
  Synthetic polypeptide
GQDSNLSVHTENPDLTPCFQNSLLAWVPCIYLWVALPCYLLYLRHHCRGYIILSHLSKLKMVLGVLLWCVSWADLFYSFHGLVHGRAPAPVFFVTPLVVGVTMLLATLLIQYERLQGVQSSGVLIIFWFLCVVCAIVPFRSKILLAKAEGEISDPFRFTTFYIHFALVLSALILACFREKPPFFSAKNVDPNPYPETSAGFLSRLFFWWFTKMAIYGYRHPLEEKDLWSLKEEDRSQMVVQQLLEAWRKQEKQTARHKASAAPGKNASGEDEVLLGARPRPRKPSFLKALLATFGSSFLISACFKLIQDLLSFINPQLLSILIRFISNPMAPSWWGFLVAGLMFLCSMMQSLILQHYYHYIFVTGVKFRTGIMGVIYRKALVITNSVKRASTVGEIVNLMSVDAQRFMDLAPFLNLLWSAPLQIILAIYFLWQNLGPSVLAGVAFMVLLIPLNGAVAVKMRAFQVKQMKLKDSRIKLMSEILNGIKVLKLYAWEPSFLKQVEGIRQGELQLLRTAAYLHTTTTFTWMCSPFLVTLITLWVYVYVDPNNVLDAEKAFVSVSLFNILRLPLNMLPQLISNLTQASVSLKRIQQFLSQEELDPQSVERKTISPGYAITIHSGTFTWAQDLPPTLHSLDIQVPKGALVAVVGPVGCGKSSLVSALLGEMEKLEGKVHMKGSVAYVPQQAWIQNCTLQENVLFGKALNPKRYQQTLEACALLADLEMLPGGDQTEIGEKGINLSGGQRQRVSLARAVYSDADIFLLDDPLSAVDSHVAKHIFDHVIGPEGVLAGKTRVLVTHGISFLPQTDFIIVLADGQVSEMGPYPALLQRNGSFANFLCNYAPDEDQGHLEDSWTALEGAEDKEALLIEDTLSNHTDLTDNDPVTYVVQKQFMRQLSALSSDGEGQGRPVPRRHLGPSEKVQVTEAKADGALTQEEKAAIGTVELSVFWDYAKAVGLCTTLAICLLYVGQSAAAIGANVWLSAWTNDAMADSRQNNTSLRLGVYAALGILQGFLVMLAAMAMAAGGIQAARVLHQALLHNKIRSPQSFFDTTPSGRILNCFSKDIYVVDEVLAPVILMLLNSFFNAISTLVVIMASTPLFTVVILPLAVLYTLVQRFYAATSRQLKRLESVSRSPIYSHFSETVTGASVIRAYNRSRDFEIISDTKVDANQRSCYPYIISNRWLSIGVEFVGNCVVLFAALFAVIGRSSLNPGLVGLSVSYSLQVTFALNWMIRMMSDLESNIVAVERVKEYSKTETEAPWVVEGSRPPEGWPPRGEVEFRNYSVRYRPGLDLVLRDLSLHVHGGEKVGIVGRTGAGKSSMTLCLFRILEAAKGEIRIDGLNVADIGLHDLRSQLTIIPQDPILFSGTLRMNLDPFGSYSEEDIWWALELSHLHTFVSSQPAGLDFQCSEGGENLSVGQRQLVCLARALLRKSRILVLDEATAAIDLETDNLIQATIRTQFDTCTVLTIAHRLNTIMDYTRVLVLDKGVVAEFDSPANLIAARGIFYGMARDAGLA

SEQ ID NO: 16455 - protein, 111 aa, Artificial Sequence
  Synthetic polypeptide
PGLQPVCAHRKPGPHSLLPELPAGLGALHLPVGRPALLLALPAAPLSWLHHPLPPVQAQDGPGCPAVVRLLGGPFLLLPWPGPWPGPCPCFLCHPLGGGGHHAAGHPADTV

SEQ ID NO: 16456 - protein, 22 aa, Artificial Sequence
  Synthetic polypeptide
IQEAEVAVKQMKLKDSRIKLMS

SEQ ID NO: 16457 - protein, 102 aa, Artificial Sequence
  Synthetic polypeptide
IQEAEVAVKQMKLKDSRIKLMSEILNGIKVLKLYAWEPSFLKQVEGIRQGELQLLRTAAYLHTTTTFTWMCSPFLVRLGTGLGPCLQGSGCPGMARAHWTLP

SEQ ID NO: 16458 - protein, 768 aa, Artificial Sequence
  Synthetic polypeptide
IQEAEVAVKQMKLKDSRIKLMSEILNGIKVLKLYAWEPSFLKQVEGIRQGELQLLRTAAYLHTTTTFTWMCSPFLVTLITLWVYVYVDPNNVLDAEKAFVSVSLFNILRLPLNMLPQLISNLTQASVSLKRIQQFLSQEELDPQSVERKTISPGYAITIHSGTFTWAQDLPPTLHSLDIQVPKGALVAVVGPVGCGKSSLVSALLGEMEKLEGKVHMKGSVAYVPQQAWIQNCTLQENVLFGKALNPKRYQQTLEACALLADLEMLPGGDQTEIGEKGINLSGGQRQRVSLARAVYSDADIFLLDDPLSAVDSHVAKHIFDHVIGPEGVLAGKTRVLVTHGISFLPQTDFIIVLADGQVSEMGPYPALLQRNGSFANFLCNYAPDEDQGHLEDSWTALEGAEDKEALLIEDTLSNHTDLTDNDPVTYVVQKQFMRQLSALSSDGEGQGRPVPRRHLGPSEKVQVTEAKADGALTQEEKAAIGTVELSVFWDYAKAVGLCTTLAICLLYVGQSAAAIGANVWLSAWTNDAMADSRQNNTSLRLGVYAALGILQGFLVMLAAMAMAAGGIQAARVLHQALLHNKIRSPQSFFDTTPSGRILNCFSKDIYVVDEVLAPVILMLLNSFFNAISTLVVIMASTPLFTVVILPLAVLYTLVQRFYAATSRQLKRLESVSRSPIYSHFSETVTGASVIRAYNRSRDFEIISDTKVDANQRSCYPYIISNRSEAASLAPCSSRNSQQALWCSGSLSLLSPKQKTGPALPLPHFLLI

SEQ ID NO: 16459 - protein, 1057 aa, Artificial Sequence
  Synthetic polypeptide
IQEAEVAVKQMKLKDSRIKLMSEILNGIKVLKLYAWEPSFLKQVEGIRQGELQLLRTAAYLHTTTTFTWMCSPFLVTLITLWVYVYVDPNNVLDAEKAFVSVSLFNILRLPLNMLPQLISNLTQASVSLKRIQQFLSQEELDPQSVERKTISPGYAITIHSGTFTWAQDLPPTLHSLDIQVPKGALVAVVGPVGCGKSSLVSALLGEMEKLEGKVHMKGSVAYVPQQAWIQNCTLQENVLFGKALNPKRYQQTLEACALLADLEMLPGGDQTEIGEKGINLSGGQRQRVSLARAVYSDADIFLLDDPLSAVDSHVAKHIFDHVIGPEGVLAGKTRVLVTHGISFLPQTDFIIVLADGQVSEMGPYPALLQRNGSFANFLCNYAPDEDQGHLEDSWTALEGAEDKEALLIEDTLSNHTDLTDNDPVTYVVQKQFMRQLSALSSDGEGQGRPVPRRHLGPSEKVQVTEAKADGALTQEEKAAIGTVELSVFWDYAKAVGLCTTLAICLLYVGQSAAAIGANVWLSAWTNDAMADSRQNNTSLRLGVYAALGILQGFLVMLAAMAMAAGGIQAARVLHQALLHNKIRSPQSFFDTTPSGRILNCFSKDIYVVDEVLAPVILMLLNSFFNAISTLVVIMASTPLFTVVILPLAVLYTLVQRFYAATSRQLKRLESVSRSPIYSHFSETVTGASVIRAYNRSRDFEIISDTKVDANQRSCYPYIISNRWLSIGVEFVGNCVVLFAALFAVIGRSSLNPGLVGLSVSYSLQVTFALNWMIRMMSDLESNIVAVERVKEYSKTETEAPWVVEGSRPPEGWPPRGEVEFRNYSVRYRPGLDLVLRDLSLHVHGGEKVGIVGRTGAGKSSMTLCLFRILEAAKGEIRIDGLNVADIGLHDLRSQLTIIPQDPILFSGTLRMNLDPFGSYSEEDIWWALELSHLHTFVSSQPAGLDFQCSEGGENLSVGQRQLVCLARALLRKSRILVLDEATAAIDLETDNLIQATIRTQFDTCTVLTIAHRLNTIMDYTRVLVLDKGVVAEFDSPANLIAARGIFYGMARDAGLA

SEQ ID NO: 16460 - protein, 34 aa, Artificial Sequence
  Synthetic polypeptide
KYKISRAWWHMPVIPATLESEAGESLESRRQRLR

SEQ ID NO: 16461 - protein, 35 aa, Artificial Sequence
  Synthetic polypeptide
SQLLWSLRQENPLNPGGRGCGKANEIEGLAHQADE

SEQ ID NO: 16462 - protein, 15 aa, Artificial Sequence
  Synthetic polypeptide
HFLQKSTLTAQSQSK

SEQ ID NO: 16463 - protein, 21 aa, Artificial Sequence
  Synthetic polypeptide
LPSLSLSKANEIEGLAHQADE

SEQ ID NO: 16464 - protein, 33 aa, Artificial Sequence
  Synthetic polypeptide
DWVQWLTPNPSTLGGGGDICSELDDTNDVRFGI

SEQ ID NO: 16465 - protein, 8 aa, Artificial Sequence
  Synthetic polypeptide
SQHFGRRR

SEQ ID NO: 16466 - protein, 308 aa, Artificial Sequence
  Synthetic polypeptide
TGCSGSHLIPALWEAEVTFALNWMIRMMSDLESNIVAVERVKEYSKTETEAPWVVEGSRPPEGWPPRGEVEFRNYSVRYRPGLDLVLRDLSLHVHGGEKVGIVGRTGAGKSSMTLCLFRILEAAKGEIRIDGLNVADIGLHDLRSQLTIIPQDPILFSGTLRMNLDPFGSYSEEDIWWALELSHLHTFVSSQPAGLDFQCSEGGENLSVGQRQLVCLARALLRKSRILVLDEATAAIDLETDNLIQATIRTQFDTCTVLTIAHRLNTIMDYTRVLVLDKGVVAEFDSPANLIAARGIFYGMARDAGLA

SEQ ID NO: 16467 - protein, 303 aa, Artificial Sequence
  Synthetic polypeptide
GQELQNSLANMVTFALNWMIRMMSDLESNIVAVERVKEYSKTETEAPWVVEGSRPPEGWPPRGEVEFRNYSVRYRPGLDLVLRDLSLHVHGGEKVGIVGRTGAGKSSMTLCLFRILEAAKGEIRIDGLNVADIGLHDLRSQLTIIPQDPILFSGTLRMNLDPFGSYSEEDIWWALELSHLHTFVSSQPAGLDFQCSEGGENLSVGQRQLVCLARALLRKSRILVLDEATAAIDLETDNLIQATIRTQFDTCTVLTIAHRLNTIMDYTRVLVLDKGVVAEFDSPANLIAARGIFYGMARDAGLA

SEQ ID NO: 16468 - protein, 41 aa, Artificial Sequence
  Synthetic polypeptide
SQHFGRRRWADHLRPGAPEQPGQHGDICSELDDTNDVRFGI

SEQ ID NO: 16469 - protein, 33 aa, Artificial Sequence
  Synthetic polypeptide
TGCSGSHLIPALWEAEVGGSPEARSSRTAWPTW

SEQ ID NO: 16470 - protein, 270 aa, Artificial Sequence
  Synthetic polypeptide
LMPVIPALWEAKAPWVVEGSRPPEGWPPRGEVEFRNYSVRYRPGLDLVLRDLSLHVHGGEKVGIVGRTGAGKSSMTLCLFRILEAAKGEIRIDGLNVADIGLHDLRSQLTIIPQDPILFSGTLRMNLDPFGSYSEEDIWWALELSHLHTFVSSQPAGLDFQCSEGGENLSVGQRQLVCLARALLRKSRILVLDEATAAIDLETDNLIQATIRTQFDTCTVLTIAHRLNTIMDYTRVLVLDKGVVAEFDSPANLIAARGIFYGMARDAGLA

SEQ ID NO: 16471 - protein, 92 aa, Artificial Sequence
  Synthetic polypeptide
RGTVTHACNPSTLGGQGALGGGRQPPSRRLAPTWGGGVPELFCALPAGPRPGAERPESACARWREGGDRGPHWGWQVFHDPLPVPHPGGGKG

SEQ ID NO: 16472 - protein, 40 aa, Artificial Sequence
  Synthetic polypeptide
SQHFGRPRRPGWWKAAALPKVGPHVGRWSSGIILCATGRA

SEQ ID NO: 16473 - protein, 8 aa, Artificial Sequence
  Synthetic polypeptide
GSWSWTKE

SEQ ID NO: 16474 - protein, 12 aa, Artificial Sequence
  Synthetic polypeptide
LEGPGPGQRSSS

SEQ ID NO: 16475 - protein, 49 aa, Artificial Sequence
  Synthetic polypeptide
SQHFGRPRRADDLRVLVLDKGVVAEFDSPANLIAARGIFYGMARDAGLA

SEQ ID NO: 16476 - protein, 22 aa, Artificial Sequence
  Synthetic polypeptide
DLSEVHEKQTTLQEKIFQNLVR

SEQ ID NO: 16477 - protein, 192 aa, Artificial Sequence
  Synthetic polypeptide
GARETDYPAGEDLSESGQVDKASLCGSMTSNSSAETDSLLGGITVVGCSAEGVTGAATSPSTNGASPVMDKPPAEEATEATEGNAGSAEDTVDISQTGVYTEHVFTDPLGVQIPEDLSPVYQSSNDSDAYKDQISVLPNEQDLVREEAQKMSSLLPTMWLGAQNGCLYVHSSVAQWRKCLHSIKLKDSILSI

SEQ ID NO: 16478 - protein, 522 aa, Artificial Sequence
  Synthetic polypeptide
GARETDYPAGEDLSESGQVDKASLCGSMTSNSSAETDSLLGGITVVGCSAEGVTGAATSPSTNGASPVMDKPPEMEAENSEVDENVPTAEEATEATEGNAGSAEDTVDISQTGVYTEHVFTDPLGVQIPEDLSPVYQSSNDSDAYKDQISVLPNEQDLVREEAQKMSSLLPTMWLGAQNGCLYVHSSVAQWRKCLHSIKLKDSILSIVHVKGIVLVALADGTLAIFHRGVDGQWDLSNYHLLDLGRPHHSIRCMTVVHDKVWCGYRNKIYVVQPKAMKIEKSFDAHPRKESQVRQLAWVGDGVWVSIRLDSTLRLYHAHTYQHLQDVDIEPYVSKMLGTGKLGFSFVRITALMVSCNRLWVGTGNGVIISIPLTETNKTSGVPGNRPGSVIRVYGDENSDKVTPGTFIPYCSMAHAQLCFHGHRDAVKFFVAVPGQVISPQSSSSGTDLTGDKAGPSAQEPGSQTPLKSMLVISGGEGYIDFRMGDEGGESELLGEDLPLEPSVTKAERSHLIVWQVMYGNE

SEQ ID NO: 16479 - protein, 535 aa, Artificial Sequence
  Synthetic polypeptide
GARETDYPAGEDLSESGQVDKASLCGSMTSNSSAETDSLLGGITVVGCSAEGVTGAATSPSTNGASPVMDKPPEMEAENSEVDENVPTAEEATEATEGNAGSAEDTVDISQTGVYTEHVFTDPLGVQIPEDLSPVYQSSNDSDAYKDQISVLPNEQDLVREEAQKMSSLLPTMWLGAQNGCLYVHSSVAQWRKCLHSIKLKDSILSIVHVKGIVLVALADGTLAIFHRGVDGQWDLSNYHLLDLGRPHHSIRCMTVVHDKVWCGYRNKIYVVQPKAMKIEKSFDAHPRKESQVRQLAWVGDGVWVSIRLDSTLRLYHAHTYQHLQDVDIEPYVSKMLGTGKLGFSFVRITALMVSCNRLWVGTGNGVIISIPLTETVILHQGRLLGLRANKTSGVPGNRPGSVIRVYGDENSDKVTPGTFIPYCSMAHAQLCFHGHRDAVKFFVAVPGQVISPQSSSSGTDLTGDKAGPSAQEPGSQTPLKSMLVISGGEGYIDFRMGDEGGESELLGEDLPLEPSVTKAERSHLIVWQVMYGNE

SEQ ID NO: 16480 - protein, 74 aa, Artificial Sequence
  Synthetic polypeptide
LGVVARTCNPRTCLRCTRNRLPCRRRSFRIWSGRQSIFMWKYDKQQLSRDRQPVRRHHSGWLFCRRCDGSCHFP

SEQ ID NO: 16481 - protein, 17 aa, Artificial Sequence
  Synthetic polypeptide
AVITLLPSSLGNRGPHI

SEQ ID NO: 16482 - protein, 281 aa, Artificial Sequence
  Synthetic polypeptide
AVITLLPSSLGNRGPHIASVTLAAYECNSVNFPEPPYPDQIICPDEEGTEGTISLWSIISKVRIEACMWGIGTAIGELPPYFMARAARLSGAEPDDEEYQEFEEMLEHAESAQDFASRAKLAVQKLVQKVGFFGILACASIPNPLFDLAGITCGHFLVPFWTFFGATLIGKAIIKMHIQKIFVIITFSKHIVEQMVAFIGAVPGIGPSLQKPFQEYLEAQRQKLHHKSEMGTPQGENWLSWMFEKLVVVMVCYFILSIINSMAQSYAKRIQQRLNSEEKTK

SEQ ID NO: 16483 - protein, 25 aa, Artificial Sequence
  Synthetic polypeptide
AWAVKTPLSCDHTTALQPGQQGSTY

SEQ ID NO: 16484 - protein, 33 aa, Artificial Sequence
  Synthetic polypeptide
AWAVKTPLSCDHTTALQPGQQGSTYSLSYISCL

SEQ ID NO: 16485 - protein, 14 aa, Artificial Sequence
  Synthetic polypeptide
SHYCPPAWATGVHI

SEQ ID NO: 16486 - protein, 54 aa, Artificial Sequence; identical to SEQ ID NO: 4975
  Synthetic polypeptide

SEQ ID NO: 16487 - protein, 11 aa, Artificial Sequence
  Synthetic polypeptide
DQPGQHVLSPA

SEQ ID NO: 16488 - protein, 109 aa, Artificial Sequence; identical to SEQ ID NO: 3510
  Synthetic polypeptide

SEQ ID NO: 16489 - protein, 47 aa, Artificial Sequence; identical to SEQ ID NO: 5344
  Synthetic polypeptide

SEQ ID NO: 16490 - protein, 82 aa, Artificial Sequence
  Synthetic polypeptide
SAVPGIGPSLQKPFQEYLEAQRQKLHHKSEMGTPQGENWLSWMFEKLVVVMVCYFILSIINSMAQSYAKRIQQRLNSEEKTK

SEQ ID NO: 16491 - protein, 7 aa, Artificial Sequence
  Synthetic polypeptide
SEVLSPA

SEQ ID NO: 16492 - protein, 80 aa, Artificial Sequence
  Synthetic polypeptide
FWCFVAVWSWSHTGATRFKPSPPTTPAWCQSSGVETARRTASPPSTSSPPRQRWTKNWDASSSLATIRSKRGLSKITGTQ

SEQ ID NO: 16493 - protein, 97 aa, Artificial Sequence
  Synthetic polypeptide
FWCFVAVWSWSHTGATRFKPSPPTTPAWCQSSGVETARRTASPPSTSSPPRQRWTKNWDASSSLATIRSKRGLSKITGTQAGTQVNEGFQPLVEALS

SEQ ID NO: 16494 - protein, 61 aa, Artificial Sequence
  Synthetic polypeptide
LCGLGVTLVLRGSSRVLQLPLLGASQVGWKLPEGPPVPHQHRHHQGKGGQKTGTLLLLWLR

SEQ ID NO: 16495 - protein, 97 aa, Artificial Sequence
  Synthetic polypeptide
VLVLCSCVVLESHWCYEVQAESSNYPCLVPVKWGGNCQKDRQSPINIVTTKAKVDKKLGRFFFSGYDKKQTWTVQNNGHSGWNPGERGLPATGGGTV

SEQ ID NO: 16496 - protein, 303 aa, Artificial Sequence
  Synthetic polypeptide
VLVLCSCVVLESHWCYEVQAESSNYPCLVPVKWGGNCQKDRQSPINIVTTKAKVDKKLGRFFFSGYDKKQTWTVQNNGHSVMMLLENKASISGGGLPAPYQAKQLHLHWSDLPYKGSEHSLDGEHFAMEMHIVHEKEKGTSRNVKEAQDPEDEIAVLAFLVEAGTQVNEGFQPLVEALSNIPKPEMSTTMAESSLLDLLPKEEKLRHYFRYLGSLTTPTCDEKVVWTVFREPIQLHREQILAFSQKLYYDKEQTVSMKDNVRPLQQLGQRTVIKSGAPGRPLPWALPALLGPMLACLLAGFLR

SEQ ID NO: 16497 - protein, 65 aa, Artificial Sequence
  Synthetic polypeptide
GILESLIQLRSVYGITRRSIRNKVLDFSVVFVFFPMPSTASKTLVIRGWIYANSGQMTMIQLEDR

SEQ ID NO: 16498 - protein, 510 aa, Artificial Sequence
  Synthetic polypeptide
GLRYIGKSDSVTISVWNHKKIHKKQGAGFLGCVRLLSNAINRLKDTGYQRLDLCKLGPNDNDTVRGQIVVSLQSRDRIGTGGQVVDCSRLFDNDLPDGWEERRTASGRIQYLNHITRTTQWERPTRPASEYSSPGRPLSCFVDENTPISGTNGATCGQSSDPRLAERRVRSQRHRNYMSRTHLHTPPDLPEGYEQRTTQQGQVYFLHTQTGVSTWHDPRVPRDLSNINCEELGPLPPGWEIRNTATGRVYFVDHNNRTTQFTDPRLSANLHLVLNRQNQLKDQQQQQVVSLCPDDTECLTVPRYKRDLVQKLKILRQELSQQQPQAGHCRIEVSREEIFEESYRQVMKMRPKDLWKRLMIKFRGEEGLDYGGVAREWLYLLSHEMLNPYYGLFQYSRDDIYTLQINPDSAVNPEHLSYFHFVGRIMGMAVFHGHYIDGGFTLPFYKQLLGKSITLDDMELVDPDLHNSLVWILENDITGVLDHTFCVEHNAYGEIIQHELKPNGKSIPVN

SEQ ID NO: 16499 - protein, 684 aa, Artificial Sequence
  Synthetic polypeptide
GLRYIGKSDSVTISVWNHKKIHKKQGAGFLGCVRLLSNAINRLKDTGYQRLDLCKLGPNDNDTVRGQIVVSLQSRDRIGTGGQVVDCSRLFDNDLPDGWEERRTASGRIQYLNHITRTTQWERPTRPASEYSSPGRPLSCFVDENTPISGTNGATCGQSSDPRLAERRVRSQRHRNYMSRTHLHTPPDLPEGYEQRTTQQGQVYFLHTQTGVSTWHDPRVPRDLSNINCEELGPLPPGWEIRNTATGRVYFVDHNNRTTQFTDPRLSANLHLVLNRQNQLKDQQQQQVVSLCPDDTECLTVPRYKRDLVQKLKILRQELSQQQPQAGHCRIEVSREEIFEESYRQVMKMRPKDLWKRLMIKFRGEEGLDYGGVAREWLYLLSHEMLNPYYGLFQYSRDDIYTLQINPDSAVNPEHLSYFHFVGRIMGMAVFHGHYIDGGFTLPFYKQLLGKSITLDDMELVDPDLHNSLVWILENDITGVLDHTFCVEHNAYGEIIQHELKPNGKSIPVNEENKKEYVRLYVNWRFLRGIEAQFLALQKGFNEVIPQHLLKTFDEKELELIICGLGKIDVNDWKVNTRLKHCTPDSNIVKWFWKAVEFFDEERRARLLQFVTGSSRVPLQGFKALQGAAGPRLFTIHQIDACTNNLPKAHTCFNRIDIPPYESYEKLYEKLLTAIEETCGFAVE

SEQ ID NO: 16500 - protein, 11 aa, Artificial Sequence
  Synthetic polypeptide
VALRTEVYWKV

SEQ ID NO: 16501 - protein, 26 aa, Artificial Sequence
  Synthetic polypeptide
FYIMDFLIHLLRWWLMDLGNAILQIL

SEQ ID NO: 16502 - protein, 17 aa, Artificial Sequence
  Synthetic polypeptide
LQENKLRAPTDSTLWTS

SEQ ID NO: 16503 - protein, 66 aa, Artificial Sequence
  Synthetic polypeptide
SVTVFLHSQMGLSSCRKTSSGLPLILHYGLPDPFAKVVVDGSGQCHSTDTVKNTLDPKWNQHYDLQ

SEQ ID NO: 16504 - protein, 572 aa, Artificial Sequence
  Synthetic polypeptide
SVTVFLHSQMGLSSCRKTSSGLPLILHYGLPDPFAKVVVDGSGQCHSTDTVKNTLDPKWNQHYDLYIGKSDSVTISVWNHKKIHKKQGAGFLGCVRLLSNAINRLKDTGYQRLDLCKLGPNDNDTVRGQIVVSLQSRDRIGTGGQVVDCSRLFDNDLPDGWEERRTASGRIQYLNHITRTTQWERPTRPASEYSSPGRPLSCFVDENTPISGTNGATCGQSSDPRLAERRVRSQRHRNYMSRTHLHTPPDLPEGYEQRTTQQGQVYFLHTQTGVSTWHDPRVPRDLSNINCEELGPLPPGWEIRNTATGRVYFVDHNNRTTQFTDPRLSANLHLVLNRQNQLKDQQQQQVVSLCPDDTECLTVPRYKRDLVQKLKILRQELSQQQPQAGHCRIEVSREEIFEESYRQVMKMRPKDLWKRLMIKFRGEEGLDYGGVAREWLYLLSHEMLNPYYGLFQYSRDDIYTLQINPDSAVNPEHLSYFHFVGRIMGMAVFHGHYIDGGFTLPFYKQLLGKSITLDDMELVDPDLHNSLVWILENDITGVLDHTFCVEHNAYGEIIQHELKPNGKSIPVN

SEQ ID NO: 16505 - protein, 746 aa, Artificial Sequence
  Synthetic polypeptide
SVTVFLHSQMGLSSCRKTSSGLPLILHYGLPDPFAKVVVDGSGQCHSTDTVKNTLDPKWNQHYDLYIGKSDSVTISVWNHKKIHKKQGAGFLGCVRLLSNAINRLKDTGYQRLDLCKLGPNDNDTVRGQIVVSLQSRDRIGTGGQVVDCSRLFDNDLPDGWEERRTASGRIQYLNHITRTTQWERPTRPASEYSSPGRPLSCFVDENTPISGTNGATCGQSSDPRLAERRVRSQRHRNYMSRTHLHTPPDLPEGYEQRTTQQGQVYFLHTQTGVSTWHDPRVPRDLSNINCEELGPLPPGWEIRNTATGRVYFVDHNNRTTQFTDPRLSANLHLVLNRQNQLKDQQQQQVVSLCPDDTECLTVPRYKRDLVQKLKILRQELSQQQPQAGHCRIEVSREEIFEESYRQVMKMRPKDLWKRLMIKFRGEEGLDYGGVAREWLYLLSHEMLNPYYGLFQYSRDDIYTLQINPDSAVNPEHLSYFHFVGRIMGMAVFHGHYIDGGFTLPFYKQLLGKSITLDDMELVDPDLHNSLVWILENDITGVLDHTFCVEHNAYGEIIQHELKPNGKSIPVNEENKKEYVRLYVNWRFLRGIEAQFLALQKGFNEVIPQHLLKTFDEKELELIICGLGKIDVNDWKVNTRLKHCTPDSNIVKWFWKAVEFFDEERRARLLQFVTGSSRVPLQGFKALQGAAGPRLFTIHQIDACTNNLPKAHTCFNRIDIPPYESYEKLYEKLLTAIEETCGFAVE

SEQ ID NO: 16506 - protein, 11 aa, Artificial Sequence
  Synthetic polypeptide
FYIMYSVQKTW

SEQ ID NO: 16507 - protein, 30 aa, Artificial Sequence
  Synthetic polypeptide
LQENKLRAPTDSTLCTLCKKPGEKGFFPTS

SEQ ID NO: 16508 - protein, 79 aa, Artificial Sequence
  Synthetic polypeptide
SVTVFLHSQMGLSSCRKTSSGLPLILHYVLCAKNLVKKDFFRLPDPFAKVVVDGSGQCHSTDTVKNTLDPKWNQHYDLQ

SEQ ID NO: 16509 - protein, 759 aa, Artificial Sequence
  Synthetic polypeptide
SVTVFLHSQMGLSSCRKTSSGLPLILHYVLCAKNLVKKDFFRLPDPFAKVVVDGSGQCHSTDTVKNTLDPKWNQHYDLYIGKSDSVTISVWNHKKIHKKQGAGFLGCVRLLSNAINRLKDTGYQRLDLCKLGPNDNDTVRGQIVVSLQSRDRIGTGGQVVDCSRLFDNDLPDGWEERRTASGRIQYLNHITRTTQWERPTRPASEYSSPGRPLSCFVDENTPISGTNGATCGQSSDPRLAERRVRSQRHRNYMSRTHLHTPPDLPEGYEQRTTQQGQVYFLHTQTGVSTWHDPRVPRDLSNINCEELGPLPPGWEIRNTATGRVYFVDHNNRTTQFTDPRLSANLHLVLNRQNQLKDQQQQQVVSLCPDDTECLTVPRYKRDLVQKLKILRQELSQQQPQAGHCRIEVSREEIFEESYRQVMKMRPKDLWKRLMIKFRGEEGLDYGGVAREWLYLLSHEMLNPYYGLFQYSRDDIYTLQINPDSAVNPEHLSYFHFVGRIMGMAVFHGHYIDGGFTLPFYKQLLGKSITLDDMELVDPDLHNSLVWILENDITGVLDHTFCVEHNAYGEIIQHELKPNGKSIPVNEENKKEYVRLYVNWRFLRGIEAQFLALQKGFNEVIPQHLLKTFDEKELELIICGLGKIDVNDWKVNTRLKHCTPDSNIVKWFWKAVEFFDEERRARLLQFVTGSSRVPLQGFKALQGAAGPRLFTIHQIDACTNNLPKAHTCFNRIDIPPYESYEKLYEKLLTAIEETCGFAVE

SEQ ID NO: 16510 - protein, 197 aa, Artificial Sequence
  Synthetic polypeptide
PAPANEIRGEVSRVGLEAQVQDMAELLLQPLLQQDCDGSCSIPVGPRMQPAEASLTLNVQPPFDGEDEDELFQSIMEHNVSYPKSLSKEAVSVCKGLMTKHPAKRLGCGPEGERDVREHAFFRRIDWEKLENREIQPPFKPKVCGKGAENFDKFFTRGQPVLTPPDQLVIANIDQSDFEGFSYVNPQFVHPILQSAV

SEQ ID NO: 16511 - protein, 41 aa, Artificial Sequence
  Synthetic polypeptide
PSTYSLHLMVKMKTSYFSLSWSTTFPIQNPCPRRLFLSAKD

SEQ ID NO: 16512 - protein, 26 aa, Artificial Sequence
  Synthetic polypeptide
WQLLHPGGSPNATSRGLSDPQRTASI

SEQ ID NO: 16513 - protein, 3 aa, Artificial Sequence
  Synthetic polypeptide
ATY

SEQ ID NO: 16514 - protein, 51 aa, Artificial Sequence
  Synthetic polypeptide
PAWWFTPIISALWEAEAGGSLKPMVQDQPEQHTKHAFAIEEYSFSQATLEQ

SEQ ID NO: 16515 - protein, 86 aa, Artificial Sequence
  Synthetic polypeptide
PAWWFTPIISALWEAEAGGSLKPMVQDQPEQHTKHAFAIEEYSFSQATLEQVFVELTKEQEEEDNSCGTLNSTLWWERTQEDRVVF

SEQ ID NO: 16516 - protein, 43 aa, Artificial Sequence
  Synthetic polypeptide
SQHFGRLRREDPLSPWFKTSLSNILNMLLPLKNIAFLKQHWNR

SEQ ID NO: 16517 - protein, 45 aa, Artificial Sequence
  Synthetic polypeptide
SQHFGRLRREDPLSPWFKTSLSNILNMLLPLKNIAFLKQHWNRFL

SEQ ID NO: 16518 - protein, 33 aa, Artificial Sequence
  Synthetic polypeptide
GQEFKTSLVIITEEYTNEKEMLTSSLSKPSNFV

SEQ ID NO: 16519 - protein, 156 aa, Artificial Sequence
  Synthetic polypeptide
GQEFKTSLVIITEEYTNEKEMLTSSLSKPSNFVGVVFKDSMSYELRFFPDMIPVSSIYMDSRAGCSKSCEAAQYWSSGFTVLQASIDAAIIQLKTNVSLWKELESTKAVIMGETAVVEIDTFPRGVILIYLVIAFSPFGYFLAIHIVAEKEKKIKE

SEQ ID NO: 16520 - protein, 823 aa, Artificial Sequence
  Synthetic polypeptide
GQEFKTSLVIITEEYTNEKEMLTSSLSKPSNFVGVVFKDSMSYELRFFPDMIPVSSIYMDSRAGCSKSCEAAQYWSSGFTVLQASIDAAIIQLKTNVSLWKELESTKAVIMGETAVVEIDTFPRGVILIYLVIAFSPFGYFLAIHIVAEKEKKIKEFLKIMGLHDTAFWLSWVLLYTSLIFLMSLLMAVIATASLLFPQSSSIVIFLLFFLYGLSSVFFALMLTPLFKKSKHVGIVEFFVTVAFGFIGLMIILIESFPKSLVWLFSPFCHCTFVIGIAQVMHLEDFNEGASFSNLTAGPYPLIITIIMLTLNSIFYVLLAVYLDQVIPGEFGLRRSSLYFLKPSYWSKSKRNYEELSEGNVNGNISFSEIIEPVSSEFVGKEAIRISGIQKTYRKKGENVEALRNLSFDIYEGQITALLGHSGTGKSTLMNILCGLCPPSDGFASIYGHRVSEIDEMFEARKMIGICPQLDIHFDVLTVEENLSILASIKGIPANNIIQEVQKVLLDLDMQTIKDNQAKKLSGGQKRKLSLGIAVLGNPKILLLDEPTAGMDPCSRHIVWNLLKYRKANRVTVFSTHFMDEADILADRKAVISQGMLKCVGSSMFLKSKWGIGYRLSMYIDKYCATESLSSLVKQHIPGATLLQQNDQQLVYSLPFKDMDKFSGLFSALDSHSNLGVISYGVSMTTLEDVFLKLEVEAEIDQADYSVFTQQPLEEEMDSKSFDEMEQSLLILSETKAALVSTMSLWKQQMYTIAKFHFFTLKRESKSVRSVLLLLLIFFTVQIFMFLVHHSFKNAVVPIKLVPDLYFLKPGDKPHKYKTSLLL

SEQ ID NO: 16521 - protein, 1549 aa, Artificial Sequence
  Synthetic polypeptide
GQEFKTSLVIITEEYTNEKEMLTSSLSKPSNFVGVVFKDSMSYELRFFPDMIPVSSIYMDSRAGCSKSCEAAQYWSSGFTVLQASIDAAIIQLKTNVSLWKELESTKAVIMGETAVVEIDTFPRGVILIYLVIAFSPFGYFLAIHIVAEKEKKIKEFLKIMGLHDTAFWLSWVLLYTSLIFLMSLLMAVIATASLLFPQSSSIVIFLLFFLYGLSSVFFALMLTPLFKKSKHVGIVEFFVTVAFGFIGLMIILIESFPKSLVWLFSPFCHCTFVIGIAQVMHLEDFNEGASFSNLTAGPYPLIITIIMLTLNSIFYVLLAVYLDQVIPGEFGLRRSSLYFLKPSYWSKSKRNYEELSEGNVNGNISFSEIIEPVSSEFVGKEAIRISGIQKTYRKKGENVEALRNLSFDIYEGQITALLGHSGTGKSTLMNILCGLCPPSDGFASIYGHRVSEIDEMFEARKMIGICPQLDIHFDVLTVEENLSILASIKGIPANNIIQEVQKVLLDLDMQTIKDNQAKKLSGGQKRKLSLGIAVLGNPKILLLDEPTAGMDPCSRHIVWNLLKYRKANRVTVFSTHFMDEADILADRKAVISQGMLKCVGSSMFLKSKWGIGYRLSMYIDKYCATESLSSLVKQHIPGATLLQQNDQQLVYSLPFKDMDKFSGLFSALDSHSNLGVISYGVSMTTLEDVFLKLEVEAEIDQADYSVFTQQPLEEEMDSKSFDEMEQSLLILSETKAALVSTMSLWKQQMYTIAKFHFFTLKRESKSVRSVLLLLLIFFTVQIFMFLVHHSFKNAVVPIKLVPDLYFLKPGDKPHKYKTSLLLQNSAADSDISDLISFFTSQNIMVTMINDSDYVSVAPHSAALNVMHSEKDYVFAAVFNSTMVYSLPILVNIISNYYLYHLNVTETIQIWSTPFFQEITDIVFKIELYFQAALLGIIVTAMPPYFAMENAENHKIKAYTQLKLSGLLPSAYWIGQAVVDIPLFFIILILMLGSLLAFHYGLYFYTVKFLAVVFCLIGYVPSVILFTYIASFTFKKILNTKEFWSFIYSVAALACIAITEITFFMGYTIATILHYAFCIIIPIYPLLGCLISFIKISWKNVRKNVDTYNPWDRLSVAVISPYLQCVLWIFLLQYYEKKYGGRSIRKDPFFRNLSTKSKNRKLPEPPDNEDEDEDVKAERLKVKELMGCQCCEEKPSIMVSNLHKEYDDKKDFLLSRKVKKVATKYISFCVKKGEILGLLGPNGAGKSTIINILVGDIEPTSGQVFLGDYSSETSEDDDSLKCMGYCPQINPLWPDTTLQEHFEIYGAVKGMSASDMKEVISRITHALDLKEHLQKTVKKLPAGIKRKLCFALSMLGNPQITLLDEPSTGMDPKAKQHMWRAIRTAFKNRKRAAILTTHYMEEAEAVCDRVAIMVSGQLRCIGTVQHLKSKFGKGYFLEIKLKDWIENLEVDRLQREIQYIFPNASRQESFSSILAYKIPKEDVQSLSQSFFKLEEAKHAFAIEEYSFSQATLEQVFVELTKEQEEEDNSCGTLNSTLWWERTQEDRVVF

SEQ ID NO: 16522 - protein, 1548 aa, Artificial Sequence
  Synthetic polypeptide
GQEFKTSLVIITEEYTNEKEMLTSSLSKPSNFVGVVFKDSMSYELRFFPDMIPVSSIYMDSRAGCSKSCEAAQYWSSGFTVLQASIDAAIIQLKTNVSLWKELESTKAVIMGETAVVEIDTFPRGVILIYLVIAFSPFGYFLAIHIVAEKEKKIKEFLKIMGLHDTAFWLSWVLLYTSLIFLMSLLMAVIATASLLFPQSSSIVIFLLFFLYGLSSVFFALMLTPLFKKSKHVGIVEFFVTVAFGFIGLMIILIESFPKSLVWLFSPFCHCTFVIGIAQVMHLEDFNEGASFSNLTAGPYPLIITIIMLTLNSIFYVLLAVYLDQVIPGEFGLRRSSLYFLKPSYWSKSKRNYEELSEGNVNGNISFSEIIEPVSSEFVGKEAIRISGIQKTYRKKGENVEALRNLSFDIYEGQITALLGHSGTGKSTLMNILCGLCPPSDGFASIYGHRVSEIDEMFEARKMIGICPQLDIHFDVLTVEENLSILASIKGIPANNIIQEVQKVLLDLDMQTIKDNQAKKLSGGQKRKLSLGIAVLGNPKILLLDEPTAGMDPCSRHIVWNLLKYRKANRVTVFSTHFMDEADILADRKAVISQGMLKCVGSSMFLKSKWGIGYRLSMYIDKYCATESLSSLVKQHIPGATLLQQNDQQLVYSLPFKDMDKFSGLFSALDSHSNLGVISYGVSMTTLEDVFLKLEVEAEIDQADYSVFTQQPLEEEMDSKSFDEMEQSLLILSETKAALVSTMSLWKQQMYTIAKFHFFTLKRESKSVRSVLLLLLIFFTVQIFMFLVHHSFKNAVVPIKLVPDLYFLKPGDKPHKYKTSLLLQNSADSDISDLISFFTSQNIMVTMINDSDYVSVAPHSAALNVMHSEKDYVFAAVFNSTMVYSLPILVNIISNYYLYHLNVTETIQIWSTPFFQEITDIVFKIELYFQAALLGIIVTAMPPYFAMENAENHKIKAYTQLKLSGLLPSAYWIGQAVVDIPLFFIILILMLGSLLAFHYGLYFYTVKFLAVVFCLIGYVPSVILFTYIASFTFKKILNTKEFWSFIYSVAALACIAITEITFFMGYTIATILHYAFCIIIPIYPLLGCLISFIKISWKNVRKNVDTYNPWDRLSVAVISPYLQCVLWIFLLQYYEKKYGGRSIRKDPFFRNLSTKSKNRKLPEPPDNEDEDEDVKAERLKVKELMGCQCCEEKPSIMVSNLHKEYDDKKDFLLSRKVKKVATKYISFCVKKGEILGLLGPNGAGKSTIINILVGDIEPTSGQVFLGDYSSETSEDDDSLKCMGYCPQINPLWPDTTLQEHFEIYGAVKGMSASDMKEVISRITHALDLKEHLQKTVKKLPAGIKRKLCFALSMLGNPQITLLDEPSTGMDPKAKQHMWRAIRTAFKNRKRAAILTTHYMEEAEAVCDRVAIMVSGQLRCIGTVQHLKSKFGKGYFLEIKLKDWIENLEVDRLQREIQYIFPNASRQESFSSILAYKIPKEDVQSLSQSFFKLEEAKHAFAIEEYSFSQATLEQVFVELTKEQEEEDNSCGTLNSTLWWERTQEDRVVF

SEQ ID NO: 16523 - protein, 31 aa, Artificial Sequence
  Synthetic polypeptide
QVHWLMPVIPTSPEAQVGGSLEARSSRPAWS

SEQ ID NO: 16524 - protein, 25 aa, Artificial Sequence
  Synthetic polypeptide
SQLVRRLRWEDHLRPGVQDQLGHNY

SEQ ID NO: 16525 - protein, 21 aa, Artificial Sequence
  Synthetic polypeptide
ARGSRCWSWIWGYRKDGICYL

SEQ ID NO: 16526 - protein, 13 aa, Artificial Sequence
  Synthetic polypeptide
GQRVSLLELDLGL

SEQ ID NO: 16527 - protein, 70 aa, Artificial Sequence
  Synthetic polypeptide
PEGLAVGVGFGAIEKTASATFESARNLAIGIGIQNFPEGLAVSLPLRGAGFSTWRAFWYGQLSGMVEPLA

SEQ ID NO: 16528 - protein, 136 aa, Artificial Sequence
  Synthetic polypeptide
PEGLAVGVGFGAIEKTASATFESARNLAIGIGIQNFPEGLAVSLPLRGAGFSTWRAFWYGQLSGMVEPLAGVFGAFAVVLAEPILPYALAFAAGAMVYVVMDDIIPEAQISGNGKLASWASILGFVVMMSLDVGLG

SEQ ID NO: 16529 - protein, 39 aa, Artificial Sequence
  Synthetic polypeptide
PEGLAVGVGFGAIEKTASATFESARVLNLVSCPGLNLPS

SEQ ID NO: 16530 - protein, 51 aa, Artificial Sequence
  Synthetic polypeptide
GAFPSLLGMSLSCHHMKKDVFASPSAMIVSFLRPPQLCETRVSLLELDLGL

SEQ ID NO: 16531 - protein, 27 aa, Artificial Sequence
  Synthetic polypeptide
GLPSCVKLGSRCWSWIWGYRKDGICYL

SEQ ID NO: 16532 - protein, 47 aa, Artificial Sequence
  Synthetic polypeptide
KNLLSIDVHSSCIQNCQNLEATKMSLTVLRWALVSMETARPTMGRTS

SEQ ID NO: 16533 - protein, 58 aa, Artificial Sequence
  Synthetic polypeptide
QCCGGRWFLWKQRDQRWGVPADVLLGRCQPHLLWDRCSGFRNYPEDEGGPRAAPGPAQ

SEQ ID NO: 16534 - protein, 461 aa, Artificial Sequence
  Synthetic polypeptide
QKPALHRCSQQLYSELPELGSNEDVFNSAAVGVGFYGNSETNDGAYQLMYSLDDANHTFSGIDALVSGTTQKMKVDLEQHLARLSEIFAARGDYLQTLKFIQQMAGSVVVQLSGLPVWREVTMELTKLSDQTGYVEYYRWLSYLLLFILDLVICLIACLGLAKRSKCLLASMLCCGALSLLLSWASLAADGSAAVATSDFCVAPDTFILNVTEGQISTEVTRYYLYCSQSGSSPFQQTLTTFQRALTTMQIQVAGLLQFAVPLFSTAEEDLLAIQLLLNSSESSLHQLTAMVDCRGLHKDYLDALAGICYDGLQGLLYLGLFSFLAALAFSTMICAGPRAWKHFTTRNRDYDDIDDDDPFNPQAWRMAAHSPPRGQLHSFCSYSSGLGSQTSLQPPAQTISNAPVSEYMNQAMLFGRNPRYENVPLIGRASPPPTYSPSMRATYLSVADEHLRHYGNQFPA

SEQ ID NO: 16535 - protein, 51 aa, Artificial Sequence
  Synthetic polypeptide
IPALPCAGSGILGVHFSLQPSASTSVKGTACRVIGKIWWHDSASFGLGSVP

SEQ ID NO: 16536 - protein, 56 aa, Artificial Sequence
  Synthetic polypeptide
KALPAGLLGRFGGMTARASASALYHEEGPQWLWLQPAQRQVQARPVHPVSGPRLPG

SEQ ID NO: 16537 - protein, 212 aa, Artificial Sequence
  Synthetic polypeptide
QRELRPRLCTMKKGPSGYGFNLHSDKSKPGQFIRSVDPDSPAEASGLRAQDRIVEVNGVCMEGKQHGDVVSAIRAGGDETKLLVVDRETDEFFKKCRVIPSQEHLNGPLPVPFTNGEIQKENSREALAEAALESPRPALVRSASSDTSEELNSQDSPPKQDSTAPSSTSSSDPILDFNISLAMAKERAHQKRSSKRAPQMDWSKKNELFSNL

SEQ ID NO: 16538 - protein, 29 aa, Artificial Sequence
  Synthetic polypeptide
SQHFGRPRTTSPWRVSCCSSLGRPGKSCR

SEQ ID NO: 16539 - protein, 20 aa, Artificial Sequence
  Synthetic polypeptide
VAHACNPSTLGGQGLHPRGG

SEQ ID NO: 16540 - protein, 728 aa, Artificial Sequence; identical to SEQ ID NO: 1704
  Synthetic polypeptide

SEQ ID NO: 16541 - protein, 781 aa, Artificial Sequence; identical to SEQ ID NO: 1644
  Synthetic polypeptide

SEQ ID NO: 16542 - protein, 798 aa, Artificial Sequence; identical to SEQ ID NO: 1638
  Synthetic polypeptide

SEQ ID NO: 16543 - protein, 7 aa, Artificial Sequence
  Synthetic polypeptide
GLHPRGG

SEQ ID NO: 16544 - protein, 33 aa, Artificial Sequence; identical to SEQ ID NO: 6287
  Synthetic polypeptide

SEQ ID NO: 16545 - protein, 740 aa, Artificial Sequence; identical to SEQ ID NO: 1694
  Synthetic polypeptide

SEQ ID NO: 16546 - protein, 793 aa, Artificial Sequence; identical to SEQ ID NO: 1639
  Synthetic polypeptide

SEQ ID NO: 16547 - protein, 810 aa, Artificial Sequence; identical to SEQ ID NO: 1633
  Synthetic polypeptide

SEQ ID NO: 16548 - protein, 67 aa, Artificial Sequence
  Synthetic polypeptide
AMITPTLLPGSQSSGWPTAASTRAWSSPAAASCTPSPASSTSGSRVGSRQNSPAAVSSQGPGTDVQD

SEQ ID NO: 16549 - protein, 63 aa, Artificial Sequence
  Synthetic polypeptide
AMITPTLLPGSQSSGWPTAASTRAWSSPAAASCTPSPASSTSGSRVGSRQNSRRSWPPHSAPC

SEQ ID NO: 16550 - protein, 75 aa, Artificial Sequence
  Synthetic polypeptide
AQDFKAAVSYDHTNTPARITEQWLAYSRLYQSLEFPSSCLLHPITSIEYQWIQGRLKAEQPGCSLFSGSWYRCAR

SEQ ID NO: 16551 - protein, 759 aa, Artificial Sequence
  Synthetic polypeptide
AQDFKAAVSYDHTNTPARITEQWLAYSRLYQSLEFPSSCLLHPITSIEYQWIQGRLKAEQQEELAASFSSLLTYGLSLIRRFRSVFPLSVSDSPARLQSLLRVLVQMCKMKAFGELCPNTAPLPQLVTEALQTGTTEWFHLKQQHHQPMVQGIPEAGKALLGLVQDVIGDLHQCQRTWDKIFHNTLKIHLFSMAFRELQWLVAKRVQDHTTVVGDVVSPEMGESLFQLYISLKELCQLRMSSSERDGVLALDNFHRWFQPAIPSWLQKTYNEALARVQRAVQMDELVPLGELTKHSTSAVDLSTCFAQISHTARQLDWPDPEEAFMITVKFVEDTCRLALVYCSLIKARARELSSGQKDQGQAANMLCVVVNDMEQLRLVIGKLPAQLAWEALEQRVGAVLEQGQLQNTLHAQLQSALAGLGHEIRTGVRTLAEQLEVGIAKHIQKLVGVRESVLPEDAILPLMKFLEVELCYMNTNLVQENFSSLLTLLWTHTLTVLVEAAASQRSSSLASNRLKIALQNLEICFHAEGCGLPPKALHTATFQALQRDLELQAASSRELIRKYFCSRIQQQAETTSEELGAVTVKASYRASEQKLRVELLSASSLLPLDSNGSSDPFVQLTLEPRHEFPELAARETQKHKKDLHPLFDETFEFLVPAEPCRKAGACLLLTVLDYDTLGADDLEGEAFLPLREVPGLSGSEEPGEVPQTRLPLTYPAPNGDPILQLLEGRKGDREAQVFVRLRRHRAKQASQHALRPAP

SEQ ID NO: 16552 - protein, 811 aa, Artificial Sequence
  Synthetic polypeptide
AQDFKAAVSYDHTNTPARITEQWLAYSRLYQSLEFPSSCLLHPITSIEYQWIQGRLKAEQQEELAASFSSLLTYGLSLIRRFRSVFPLSVSDSPARLQSLLRVLVQMCKMKAFGELCPNTAPLPQLVTEALQTGTTEWFHLKQQHHQPMVQGIPEAGKALLGLVQDVIGDLHQCQRTWDKIFHNTLKIHLFSMAFRELQWLVAKRVQDHTTVVGDVVSPEMGESLFQLYISLKELCQLRMSSSERDGVLALDNFHRWFQPAIPSWLQKTYNEALARVQRAVQMDELVPLGELTKHSTSAVDLSTCFAQISHTARQLDWPDPEEAFMITVKFVEDTCRLALVYCSLIKARARELSSGQKDQGQAANMLCVVVNDMEQLRLVIGKLPAQLAWEALEQRVGAVLEQGQLQNTLHAQLQSALAGLGHEIRTGVRTLAEQLEVGIAKHIQKLVGVRESVLPEDAILPLMKFLEVELCYMNTNLVQENFSSLLTLLWTHTLTVLVEAAASQRSSSLASNRLKIALQNLEICFHAEGCGLPPKALHTATFQALQRDLELQAASSRELIRKYFCSRIQQQAETTSEELGAVTVKASYRASEQKLRVELLSASSLLPLDSNGSSDPFVQLTLEPRHEFPELAARETQKHKKDLHPLFDETFEFLVPAEPCRKAGACLLLTVLDYDTLGADDLEGEAFLPLREVPGLSGSEEPGEVPQTRLPLTYPAPNGDPILQLLEGRKGDREAQVFVRLRRHRAKQGIGPSVSWPWPICLLAFLFQPLGWGPGSLGPGLQAQSLLEKGEGTLPKMRLQLPWGEGGGHY

SEQ ID NO: 16553 - protein, 117 aa, Artificial Sequence
  Synthetic polypeptide
SHQHSCPDHRAVAGLQPPLPEPGVPQQLPPAPHHQHRVPVDPGSAQGRTAGGAGRLIQLPADLRPLPHPEVPLCLPPLCLGLPSPAAVSSQGPGTDVQDEGLWRTVPQHRPIAPAGD

SEQ ID NO: 16554 - protein, 65 aa, Artificial Sequence
  Synthetic polypeptide
SHQHSCPDHRAVAGLQPPLPEPGVPQQLPPAPHHQHRVPVDPGSAQGRTARLQSLLRVLVQMCKM

SEQ ID NO: 16555 - protein, 24 aa, Artificial Sequence
  Synthetic polypeptide
DFMNVYYQIRSSQLDRSIKGLKEH

SEQ ID NO: 16556 - protein, 463 aa, Artificial Sequence
  Synthetic polypeptide
DFMNVYYQIRSSQLDRSIKGLKEHFHKSSSSSGVPYSPAIPNKRKDTPTKKPVKRPGHEHDFRVKHLSEALNDKHGPLAGRDDMLDVETDAYIHCVSAFVKLAQSEYQLLADIIPEHHQKKTFDSLIQDALDGLMLEGENIVSAARKAIVRHDFSTVLTVFPILRHLKQTKPEFDQVLQGTAASTKNKLPGLITSMETIGAKALEDFADNIKNDPDKEYNMPKDGTVHELTSNAILFLQQLLDFQETAGAMLASQETSSSATSYSSEFSKRLLSTYICKVLGNLQLNLLSKSKVYEDPALSAIFLHNNYNYILKSLEKSELIQLVAVTQKTAERSYREHIEQQIQTYQRSWLKVTDYIAEKNLPVFQPGVKLRDKERQIIKERFKGFNDGLEELCKIQKAWAIPDTEQRDRIRQAQKTIVKETYGAFLQKFGSVPFTKNPEKYIKYGVEQVGDMIDRLFDTSA

SEQ ID NO: 16557 - protein, 440 aa, Artificial Sequence
  Synthetic polypeptide
DFMNVYYQIRSSQLDRSIKGLKEHFHKSSSSSGVPYSPAIPNKRKDTPTKKPVKRPGRDDMLDVETDAYIHCVSAFVKLAQSEYQLLADIIPEHHQKKTFDSLIQDALDGLMLEGENIVSAARKAIVRHDFSTVLTVFPILRHLKQTKPEFDQVLQGTAASTKNKLPGLITSMETIGAKALEDFADNIKNDPDKEYNMPKDGTVHELTSNAILFLQQLLDFQETAGAMLASQETSSSATSYSSEFSKRLLSTYICKVLGNLQLNLLSKSKVYEDPALSAIFLHNNYNYILKSLEKSELIQLVAVTQKTAERSYREHIEQQIQTYQRSWLKVTDYIAEKNLPVFQPGVKLRDKERQIIKERFKGFNDGLEELCKIQKAWAIPDTEQRDRIRQAQKTIVKETYGAFLQKFGSVPFTKNPEKYIKYGVEQVGDMIDRLFDTSA

SEQ ID NO: 16558 - protein, 480 aa, Artificial Sequence
  Synthetic polypeptide
DFMNVYYQIRSSQLDRSIKGLKEHFHKSSSSSGVPYSPAIPNKRKDTPTKKPVKRPGTIRKAQNLLKQYSQHGLDGKKGGSNLIPLEGHEHDFRVKHLSEALNDKHGPLAGRDDMLDVETDAYIHCVSAFVKLAQSEYQLLADIIPEHHQKKTFDSLIQDALDGLMLEGENIVSAARKAIVRHDFSTVLTVFPILRHLKQTKPEFDQVLQGTAASTKNKLPGLITSMETIGAKALEDFADNIKNDPDKEYNMPKDGTVHELTSNAILFLQQLLDFQETAGAMLASQETSSSATSYSSEFSKRLLSTYICKVLGNLQLNLLSKSKVYEDPALSAIFLHNNYNYILKSLEKSELIQLVAVTQKTAERSYREHIEQQIQTYQRSWLKVTDYIAEKNLPVFQPGVKGFNDGLEELCKIQKAWAIPDTEQRDRIRQAQKTIVKETYGAFLQKFGSVPFTKNPEKYIKYGVEQVGDMIDRLFDTSA

SEQ ID NO: 16559 - protein, 494 aa, Artificial Sequence
  Synthetic polypeptide
DFMNVYYQIRSSQLDRSIKGLKEHFHKSSSSSGVPYSPAIPNKRKDTPTKKPVKRPGTIRKAQNLLKQYSQHGLDGKKGGSNLIPLEGHEHDFRVKHLSEALNDKHGPLAGRDDMLDVETDAYIHCVSAFVKLAQSEYQLLADIIPEHHQKKTFDSLIQDALDGLMLEGENIVSAARKAIVRHDFSTVLTVFPILRHLKQTKPEFDQVLQGTAASTKNKLPGLITSMETIGAKALEDFADNIKNDPDKEYNMPKDGTVHELTSNAILFLQQLLDFQETAGAMLASQETSSSATSYSSEFSKRLLSTYICKVLGNLQLNLLSKSKVYEDPALSAIFLHNNYNYILKSLEKSELIQLVAVTQKTAERSYREHIEQQIQTYQRSWLKVTDYIAEKNLPVFQPGVKLRDKERQIIKERFKGFNDGLEELCKIQKAWAIPDTEQRDRIRQAQKTIVKETYGAFLQKFGSVPFTKNPEKYIKYGVEQVGDMIDRLFDTSA

SEQ ID NO: 16560 - protein, 522 aa, Artificial Sequence
  Synthetic polypeptide
DFMNVYYQIRSSQLDRSIKGLKEHFHKSSSSSGVPYSPAIPNKRKDTPTKKPVKRPGTIRKAQNLLKQYSQHGLDGKKGGSNLIPLEGLLPCTPRGGLPGPWINAACVCAADISPGHEHDFRVKHLSEALNDKHGPLAGRDDMLDVETDAYIHCVSAFVKLAQSEYQLLADIIPEHHQKKTFDSLIQDALDGLMLEGENIVSAARKAIVRHDFSTVLTVFPILRHLKQTKPEFDQVLQGTAASTKNKLPGLITSMETIGAKALEDFADNIKNDPDKEYNMPKDGTVHELTSNAILFLQQLLDFQETAGAMLASQETSSSATSYSSEFSKRLLSTYICKVLGNLQLNLLSKSKVYEDPALSAIFLHNNYNYILKSLEKSELIQLVAVTQKTAERSYREHIEQQIQTYQRSWLKVTDYIAEKNLPVFQPGVKLRDKERQIIKERFKGFNDGLEELCKIQKAWAIPDTEQRDRIRQAQKTIVKETYGAFLQKFGSVPFTKNPEKYIKYGVEQVGDMIDRLFDTSA

SEQ ID NO: 16561 - protein, 471 aa, Artificial Sequence
  Synthetic polypeptide
DFMNVYYQIRSSQLDRSIKGLKEHFHKSSSSSGVPYSPAIPNKRKDTPTKKPVKRPGTIRKAQNLLKQYSQHGLDGKKGGSNLIPLEGRDDMLDVETDAYIHCVSAFVKLAQSEYQLLADIIPEHHQKKTFDSLIQDALDGLMLEGENIVSAARKAIVRHDFSTVLTVFPILRHLKQTKPEFDQVLQGTAASTKNKLPGLITSMETIGAKALEDFADNIKNDPDKEYNMPKDGTVHELTSNAILFLQQLLDFQETAGAMLASQETSSSATSYSSEFSKRLLSTYICKVLGNLQLNLLSKSKVYEDPALSAIFLHNNYNYILKSLEKSELIQLVAVTQKTAERSYREHIEQQIQTYQRSWLKVTDYIAEKNLPVFQPGVKLRDKERQIIKERFKGFNDGLEELCKIQKAWAIPDTEQRDRIRQAQKTIVKETYGAFLQKFGSVPFTKNPEKYIKYGVEQVGDMIDRLFDTSA

SEQ ID NO: 16562 - protein, 449 aa, Artificial Sequence
  Synthetic polypeptide
DFMNVYYQIRSSQLDRSIKGLKEHFHKSSSSSGVPYSPAIPNKRKDTPTKKPVKRPGTIRKAQNLLKQYSQHGLDGKKGGSNLIPLEGRDDMLDVETDAYIHCVSAFVKLAQSEYQLLADIIPEHHQKKTFDSLIQDALDGLMLEGENIVSAARKAIVRHDFSTVLTVFPILRHLKQTKPEFDQVLQGTAASTKNKLPGLITSMETIGAKALEDFADNIKNDPDKEYNMPKDGTVHELTSNAILFLQQLLDFQETAGAMLASQGKVLGNLQLNLLSKSKVYEDPALSAIFLHNNYNYILKSLEKSELIQLVAVTQKTAERSYREHIEQQIQTYQRSWLKVTDYIAEKNLPVFQPGVKLRDKERQIIKERFKGFNDGLEELCKIQKAWAIPDTEQRDRIRQAQKTIVKETYGAFLQKFGSVPFTKNPEKYIKYGVEQVGDMIDRLFDTSA

SEQ ID NO: 16563 - protein, 484 aa, Artificial Sequence
  Synthetic polypeptide
DFMNVYYQIRSSQLDRSIKGLKEHFHKSSSSSGVPYSPAIPNKRKDTPTKKPVKRPGTIRKAQNLLKQYSQHGLDGKKGGSNLIPLEGRDDMLDVETDAYIHCVSAFVKLAQSEYQLLADIIPEHHQKKTFDSLIQDALDGLMLEGENIVSAARKAIVRHDFSTVLTVFPILRHLKQTKPEFDQVLQGTAASTKNKLPGLITSMETIGAKALEDFADNIKNDPDKEYNMPKDGTVHELTSNAILFLQQLLDFQETAGAMLASQVLGDTYNIPLDPRETSSSATSYSSEFSKRLLSTYICKVLGNLQLNLLSKSKVYEDPALSAIFLHNNYNYILKSLEKSELIQLVAVTQKTAERSYREHIEQQIQTYQRSWLKVTDYIAEKNLPVFQPGVKLRDKERQIIKERFKGFNDGLEELCKIQKAWAIPDTEQRDRIRQAQKTIVKETYGAFLQKFGSVPFTKNPEKYIKYGVEQVGDMIDRLFDTSA

SEQ ID NO: 16564 - protein, 18 aa, Artificial Sequence
  Synthetic polypeptide
PGAVAMPVILTVWEAEIS

SEQ ID NO: 16565 - protein, 29 aa, Artificial Sequence
  Synthetic polypeptide
QFGRLRFHERLLPDTLQPAGPLHQRTEGA

SEQ ID NO: 16566 - protein, 31 aa, Artificial Sequence
  Synthetic polypeptide
QFGRLRFHERLLPDTLQPAGPLHQRTEGAFP

SEQ ID NO: 16567 - protein, 162 aa, Artificial Sequence
  Synthetic polypeptide
GRTRWLMPVIPALWEAEAGRSRRQEIETILTNTEEETLSFIRDSLEKSDQLTKNMVSILSSFESRLMKLENSIIPVHKQTENLQRLQENVEKTLSCLDHVISYYHVASDTEKIIREGPTGRLEEYLGSMAKIQKAVEYFQDNSPDSPELNKVKLLFERGKEA

SEQ ID NO: 16568 - protein, 689 aa, Artificial Sequence
  Synthetic polypeptide
GRTRWLMPVIPALWEAEAGRSRRQEIETILTNTEEETLSFIRDSLEKSDQLTKNMVSILSSFESRLMKLENSIIPVHKQTENLQRLQENVEKTLSCLDHVISYYHVASDTEKIIREGPTGRLEEYLGSMAKIQKAVEYFQDNSPDSPELNKVKLLFERGKEALESEFRSLMTRHSKVVSPVLILDLISGDDDLEAQEDVTLEHLPESVLQDVIRISRWLVEYGRNQDFMNVYYQIRSSQLDRSIKGLKEHFHKSSSSSGVPYSPAIPNKRKDTPTKKPVKRPGHEHDFRVKHLSEALNDKHGPLAGRDDMLDVETDAYIHCVSAFVKLAQSEYQLLADIIPEHHQKKTFDSLIQDALDGLMLEGENIVSAARKAIVRHDFSTVLTVFPILRHLKQTKPEFDQVLQGTAASTKNKLPGLITSMETIGAKALEDFADNIKNDPDKEYNMPKDGTVHELTSNAILFLQQLLDFQETAGAMLASQETSSSATSYSSEFSKRLLSTYICKVLGNLQLNLLSKSKVYEDPALSAIFLHNNYNYILKSLEKSELIQLVAVTQKTAERSYREHIEQQIQTYQRSWLKVTDYIAEKNLPVFQPGVKLRDKERQIIKERFKGFNDGLEELCKIQKAWAIPDTEQRDRIRQAQKTIVKETYGAFLQKFGSVPFTKNPEKYIKYGVEQVGDMIDRLFDTSA

SEQ ID NO: 16569 - protein, 666 aa, Artificial Sequence
  Synthetic polypeptide
GRTRWLMPVIPALWEAEAGRSRRQEIETILTNTEEETLSFIRDSLEKSDQLTKNMVSILSSFESRLMKLENSIIPVHKQTENLQRLQENVEKTLSCLDHVISYYHVASDTEKIIREGPTGRLEEYLGSMAKIQKAVEYFQDNSPDSPELNKVKLLFERGKEALESEFRSLMTRHSKVVSPVLILDLISGDDDLEAQEDVTLEHLPESVLQDVIRISRWLVEYGRNQDFMNVYYQIRSSQLDRSIKGLKEHFHKSSSSSGVPYSPAIPNKRKDTPTKKPVKRPGRDDMLDVETDAYIHCVSAFVKLAQSEYQLLADIIPEHHQKKTFDSLIQDALDGLMLEGENIVSAARKAIVRHDFSTVLTVFPILRHLKQTKPEFDQVLQGTAASTKNKLPGLITSMETIGAKALEDFADNIKNDPDKEYNMPKDGTVHELTSNAILFLQQLLDFQETAGAMLASQETSSSATSYSSEFSKRLLSTYICKVLGNLQLNLLSKSKVYEDPALSAIFLHNNYNYILKSLEKSELIQLVAVTQKTAERSYREHIEQQIQTYQRSWLKVTDYIAEKNLPVFQPGVKLRDKERQIIKERFKGFNDGLEELCKIQKAWAIPDTEQRDRIRQAQKTIVKETYGAFLQKFGSVPFTKNPEKYIKYGVEQVGDMIDRLFDTSA

SEQ ID NO: 16570 - protein, 706 aa, Artificial Sequence
  Synthetic polypeptide
GRTRWLMPVIPALWEAEAGRSRRQEIETILTNTEEETLSFIRDSLEKSDQLTKNMVSILSSFESRLMKLENSIIPVHKQTENLQRLQENVEKTLSCLDHVISYYHVASDTEKIIREGPTGRLEEYLGSMAKIQKAVEYFQDNSPDSPELNKVKLLFERGKEALESEFRSLMTRHSKVVSPVLILDLISGDDDLEAQEDVTLEHLPESVLQDVIRISRWLVEYGRNQDFMNVYYQIRSSQLDRSIKGLKEHFHKSSSSSGVPYSPAIPNKRKDTPTKKPVKRPGTIRKAQNLLKQYSQHGLDGKKGGSNLIPLEGHEHDFRVKHLSEALNDKHGPLAGRDDMLDVETDAYIHCVSAFVKLAQSEYQLLADIIPEHHQKKTFDSLIQDALDGLMLEGENIVSAARKAIVRHDFSTVLTVFPILRHLKQTKPEFDQVLQGTAASTKNKLPGLITSMETIGAKALEDFADNIKNDPDKEYNMPKDGTVHELTSNAILFLQQLLDFQETAGAMLASQETSSSATSYSSEFSKRLLSTYICKVLGNLQLNLLSKSKVYEDPALSAIFLHNNYNYILKSLEKSELIQLVAVTQKTAERSYREHIEQQIQTYQRSWLKVTDYIAEKNLPVFQPGVKGFNDGLEELCKIQKAWAIPDTEQRDRIRQAQKTIVKETYGAFLQKFGSVPFTKNPEKYIKYGVEQVGDMIDRLFDTSA

SEQ ID NO: 16571 - protein, 720 aa, Artificial Sequence
  Synthetic polypeptide
GRTRWLMPVIPALWEAEAGRSRRQEIETILTNTEEETLSFIRDSLEKSDQLTKNMVSILSSFESRLMKLENSIIPVHKQTENLQRLQENVEKTLSCLDHVISYYHVASDTEKIIREGPTGRLEEYLGSMAKIQKAVEYFQDNSPDSPELNKVKLLFERGKEALESEFRSLMTRHSKVVSPVLILDLISGDDDLEAQEDVTLEHLPESVLQDVIRISRWLVEYGRNQDFMNVYYQIRSSQLDRSIKGLKEHFHKSSSSSGVPYSPAIPNKRKDTPTKKPVKRPGTIRKAQNLLKQYSQHGLDGKKGGSNLIPLEGHEHDFRVKHLSEALNDKHGPLAGRDDMLDVETDAYIHCVSAFVKLAQSEYQLLADIIPEHHQKKTFDSLIQDALDGLMLEGENIVSAARKAIVRHDFSTVLTVFPILRHLKQTKPEFDQVLQGTAASTKNKLPGLITSMETIGAKALEDFADNIKNDPDKEYNMPKDGTVHELTSNAILFLQQLLDFQETAGAMLASQETSSSATSYSSEFSKRLLSTYICKVLGNLQLNLLSKSKVYEDPALSAIFLHNNYNYILKSLEKSELIQLVAVTQKTAERSYREHIEQQIQTYQRSWLKVTDYIAEKNLPVFQPGVKLRDKERQIIKERFKGFNDGLEELCKIQKAWAIPDTEQRDRIRQAQKTIVKETYGAFLQKFGSVPFTKNPEKYIKYGVEQVGDMIDRLFDTSA

SEQ ID NO: 16572 - protein, 748 aa, Artificial Sequence
  Synthetic polypeptide
GRTRWLMPVIPALWEAEAGRSRRQEIETILTNTEEETLSFIRDSLEKSDQLTKNMVSILSSFESRLMKLENSIIPVHKQTENLQRLQENVEKTLSCLDHVISYYHVASDTEKIIREGPTGRLEEYLGSMAKIQKAVEYFQDNSPDSPELNKVKLLFERGKEALESEFRSLMTRHSKVVSPVLILDLISGDDDLEAQEDVTLEHLPESVLQDVIRISRWLVEYGRNQDFMNVYYQIRSSQLDRSIKGLKEHFHKSSSSSGVPYSPAIPNKRKDTPTKKPVKRPGTIRKAQNLLKQYSQHGLDGKKGGSNLIPLEGLLPCTPRGGLPGPWINAACVCAADISPGHEHDFRVKHLSEALNDKHGPLAGRDDMLDVETDAYIHCVSAFVKLAQSEYQLLADIIPEHHQKKTFDSLIQDALDGLMLEGENIVSAARKAIVRHDFSTVLTVFPILRHLKQTKPEFDQVLQGTAASTKNKLPGLITSMETIGAKALEDFADNIKNDPDKEYNMPKDGTVHELTSNAILFLQQLLDFQETAGAMLASQETSSSATSYSSEFSKRLLSTYICKVLGNLQLNLLSKSKVYEDPALSAIFLHNNYNYILKSLEKSELIQLVAVTQKTAERSYREHIEQQIQTYQRSWLKVTDYIAEKNLPVFQPGVKLRDKERQIIKERFKGFNDGLEELCKIQKAWAIPDTEQRDRIRQAQKTIVKETYGAFLQKFGSVPFTKNPEKYIKYGVEQVGDMIDRLFDTSA

SEQ ID NO: 16573 - protein, 697 aa, Artificial Sequence
  Synthetic polypeptide
GRTRWLMPVIPALWEAEAGRSRRQEIETILTNTEEETLSFIRDSLEKSDQLTKNMVSILSSFESRLMKLENSIIPVHKQTENLQRLQENVEKTLSCLDHVISYYHVASDTEKIIREGPTGRLEEYLGSMAKIQKAVEYFQDNSPDSPELNKVKLLFERGKEALESEFRSLMTRHSKVVSPVLILDLISGDDDLEAQEDVTLEHLPESVLQDVIRISRWLVEYGRNQDFMNVYYQIRSSQLDRSIKGLKEHFHKSSSSSGVPYSPAIPNKRKDTPTKKPVKRPGTIRKAQNLLKQYSQHGLDGKKGGSNLIPLEGRDDMLDVETDAYIHCVSAFVKLAQSEYQLLADIIPEHHQKKTFDSLIQDALDGLMLEGENIVSAARKAIVRHDFSTVLTVFPILRHLKQTKPEFDQVLQGTAASTKNKLPGLITSMETIGAKALEDFADNIKNDPDKEYNMPKDGTVHELTSNAILFLQQLLDFQETAGAMLASQETSSSATSYSSEFSKRLLSTYICKVLGNLQLNLLSKSKVYEDPALSAIFLHNNYNYILKSLEKSELIQLVAVTQKTAERSYREHIEQQIQTYQRSWLKVTDYIAEKNLPVFQPGVKLRDKERQIIKERFKGFNDGLEELCKIQKAWAIPDTEQRDRIRQAQKTIVKETYGAFLQKFGSVPFTKNPEKYIKYGVEQVGDMIDRLFDTSA

SEQ ID NO: 16574 - protein, 172 aa, Artificial Sequence
  Synthetic polypeptide
GRTRWLMPVIPALWEAEAGRSRRQEIETILTNTEEETLSFIRDSLEKSDQLTKNMVSILSSFESRLMKLENSIIPVHKQTENLQRLQENVEKTLSCLDHVISYYHVASDTEKIIREGPTGRLEEYLGSMAKIQKAVEYFQDNSPDSPELNKVVRGPQNNVRSLGISVSALVS

SEQ ID NO: 16575 - protein, 20 aa, Artificial Sequence
  Synthetic polypeptide
HGGGDSVLHPRQPGEERPAH

SEQ ID NO: 16576 - protein, 36 aa, Artificial Sequence
  Synthetic polypeptide
LTRRRRLCPSSETAWRRATSSLRTWCLSYHPLRAAL

SEQ ID NO: 16577 - protein, 8 aa, Artificial Sequence
  Synthetic polypeptide
AGPTSPTG

SEQ ID NO: 16578 - protein, 76 aa, Artificial Sequence; identical to SEQ ID NO: 4050
  Synthetic polypeptide

SEQ ID NO: 16579 - protein, 494 aa, Artificial Sequence; identical to SEQ ID NO: 2055
  Synthetic polypeptide

SEQ ID NO: 16580 - protein, 23 aa, Artificial Sequence
  Synthetic polypeptide
PGPVAHTCNPSTSGGLGPTSPTG

SEQ ID NO: 16581 - protein, 463 aa, Artificial Sequence; identical to SEQ ID NO: 2112
  Synthetic polypeptide

SEQ ID NO: 16582 - protein, 30 aa, Artificial Sequence
  Synthetic polypeptide
AQCLSSHQQGPFLRNARSTEKEGLLHEATL

SEQ ID NO: 16583 - protein, 51 aa, Artificial Sequence
  Synthetic polypeptide
WREDGFGARSRCAETPRSVSLSAVPEQPSAGTLSTKCSQHGKRRSPPRSDT

SEQ ID NO: 16584 - protein, 105 aa, Artificial Sequence
  Synthetic polypeptide
FYIMDKEPRGIIPLENLSIREVEDSKKPNCFELYIPDNKDQVIKACKTEADGRVVEGNHTVYRISAPTPEEKEEWIKCIKAAISRDPFYEMLAARKKKVSSTKRH

SEQ ID NO: 16585 - protein, 24 aa, Artificial Sequence
  Synthetic polypeptide
LQENKLRAPIDSTSWIRSPVESSL

SEQ ID NO: 16586 - protein, 37 aa, Artificial Sequence
  Synthetic polypeptide
TGHKQHMLGVTVSHQPQMGLSSCRKTSSGLPLILHHG

SEQ ID NO: 16587 - protein, 28 aa, Artificial Sequence
  Synthetic polypeptide
LMPIIPAFWEAKEKHAEEQTGSHGQEKI

SEQ ID NO: 16588 - protein, 25 aa, Artificial Sequence
  Synthetic polypeptide
MDAMTHAYNTSILGGQGKTCRGTNR

SEQ ID NO: 16589 - protein, 134 aa, Artificial Sequence
  Synthetic polypeptide
YQHFGRPRKNMQRNKQVAMGRKKFNMDPKKGIQFLIENDLLKNTCEDIAQFLYKGEGLNKTAIGDYLGERDEFNIQVLHAFVELHEFTDLNLVQALRQFLWSFRLPGEAQKIDRMMEAFAQRYCQCNNGVFQST

SEQ ID NO: 16590 - protein, 221 aa, Artificial Sequence
  Synthetic polypeptide
YQHFGRPRKNMQRNKQVAMGRKKFNMDPKKGIQFLIENDLLKNTCEDIAQFLYKGEGLNKTAIGDYLGERDEFNIQVLHAFVELHEFTDLNLVQALRQFLWSFRLPGEAQKIDRMMEAFAQRYCQCNNGVFQSTDTCYVLSFAIIMLNTSLHNPNVKDKPTVERFIAMNRGINDGGDLPEELLRNLYESIKNEPFKIPEDDGNDLTHTFFNPDREGWLLKL

SEQ ID NO: 16591 - protein, 349 aa, Artificial Sequence
  Synthetic polypeptide
YQHFGRPRKNMQRNKQVAMGRKKFNMDPKKGIQFLIENDLLKNTCEDIAQFLYKGEGLNKTAIGDYLGERDEFNIQVLHAFVELHEFTDLNLVQALRQFLWSFRLPGEAQKIDRMMEAFAQRYCQCNNGVFQSTDTCYVLSFAIIMLNTSLHNPNVKDKPTVERFIAMNRGINDGGDLPEELLRNLYESIKNEPFKIPEDDGNDLTHTFFNPDREGWLLKLGGGRVKTWKRRWFILTDNCLYYFEYTTDKEPRGIIPLENLSIREVEDSKKPNCFELYIPDNKDQVIKACKTEADGRVVEGNHTVYRISAPTPEEKEEWIKCIKAAISRDPFYEMLAARKKKVSSTKRH

SEQ ID NO: 16592 - protein, 348 aa, Artificial Sequence
  Synthetic polypeptide
YQHFGRPRKNMQRNKQVAMGRKKFNMDPKKGIQFLIENDLLKNTCEDIAQFLYKGEGLNKTAIGDYLGERDEFNIQVLHAFVELHEFTDLNLVQALRQFLWSFRLPGEAQKIDRMMEAFAQRYCQCNNGVFQSTDTCYVLSFAIIMLNTSLHNPNVKDKPTVERFIAMNRGINDGGDLPEELLRNLYESIKNEPFKIPEDDGNDLTHTFFNPDREGWLLKLGGRVKTWKRRWFILTDNCLYYFEYTTDKEPRGIIPLENLSIREVEDSKKPNCFELYIPDNKDQVIKACKTEADGRVVEGNHTVYRISAPTPEEKEEWIKCIKAAISRDPFYEMLAARKKKVSSTKRH

SEQ ID NO: 16593 - protein, 27 aa, Artificial Sequence
  Synthetic polypeptide
GWARWLTLIIPALWEAQAGGSPEFPVT

SEQ ID NO: 16594 - protein, 16 aa, Artificial Sequence
  Synthetic polypeptide
SQHFGRPRQADHLSSQ

SEQ ID NO: 16595 - protein, 176 aa, Artificial Sequence
  Synthetic polypeptide
VPSDLTAEERQELENIRRRKQELLADIQRLKDEIAEVANEIENLGSTEERKNMQRNKQVAMGRKKFNMDPKKGIQFLIENDLLKNTCEDIAQFLYKGEGLNKTAIGDYLGERDEFNIQVLHAFVELHEFTDLNLVQALRQFLWSFRLPGEAQKIDRMMEAFAQRYCQCNNGVFQST

SEQ ID NO: 16596 - protein, 263 aa, Artificial Sequence
  Synthetic polypeptide
VPSDLTAEERQELENIRRRKQELLADIQRLKDEIAEVANEIENLGSTEERKNMQRNKQVAMGRKKFNMDPKKGIQFLIENDLLKNTCEDIAQFLYKGEGLNKTAIGDYLGERDEFNIQVLHAFVELHEFTDLNLVQALRQFLWSFRLPGEAQKIDRMMEAFAQRYCQCNNGVFQSTDTCYVLSFAIIMLNTSLHNPNVKDKPTVERFIAMNRGINDGGDLPEELLRNLYESIKNEPFKIPEDDGNDLTHTFFNPDREGWLLKL

SEQ ID NO: 16597 - protein, 391 aa, Artificial Sequence
  Synthetic polypeptide
VPSDLTAEERQELENIRRRKQELLADIQRLKDEIAEVANEIENLGSTEERKNMQRNKQVAMGRKKFNMDPKKGIQFLIENDLLKNTCEDIAQFLYKGEGLNKTAIGDYLGERDEFNIQVLHAFVELHEFTDLNLVQALRQFLWSFRLPGEAQKIDRMMEAFAQRYCQCNNGVFQSTDTCYVLSFAIIMLNTSLHNPNVKDKPTVERFIAMNRGINDGGDLPEELLRNLYESIKNEPFKIPEDDGNDLTHTFFNPDREGWLLKLGGGRVKTWKRRWFILTDNCLYYFEYTTDKEPRGIIPLENLSIREVEDSKKPNCFELYIPDNKDQVIKACKTEADGRVVEGNHTVYRISAPTPEEKEEWIKCIKAAISRDPFYEMLAARKKKVSSTKRH

SEQ ID NO: 16598 - protein, 390 aa, Artificial Sequence
  Synthetic polypeptide
VPSDLTAEERQELENIRRRKQELLADIQRLKDEIAEVANEIENLGSTEERKNMQRNKQVAMGRKKFNMDPKKGIQFLIENDLLKNTCEDIAQFLYKGEGLNKTAIGDYLGERDEFNIQVLHAFVELHEFTDLNLVQALRQFLWSFRLPGEAQKIDRMMEAFAQRYCQCNNGVFQSTDTCYVLSFAIIMLNTSLHNPNVKDKPTVERFIAMNRGINDGGDLPEELLRNLYESIKNEPFKIPEDDGNDLTHTFFNPDREGWLLKLGGRVKTWKRRWFILTDNCLYYFEYTTDKEPRGIIPLENLSIREVEDSKKPNCFELYIPDNKDQVIKACKTEADGRVVEGNHTVYRISAPTPEEKEEWIKCIKAAISRDPFYEMLAARKKKVSSTKRH

SEQ ID NO: 16599 - protein, 57 aa, Artificial Sequence
  Synthetic polypeptide
VPSDLTAEERQELENIRRRKQELLADIQRLKDEIAEVANEIENLGSTEESFSFCYFF

SEQ ID NO: 16600 - protein, 71 aa, Artificial Sequence
  Synthetic polypeptide
AQQDEAADSRERSVGGVHPGGGPGDGSAGAAVSGLPDLTVLLHPQVCPGCRHHHGRGPAVRHQDLQDALAC

SEQ ID NO: 16601 - protein, 5 aa, Artificial Sequence
  Synthetic polypeptide
GCRQP

SEQ ID NO: 16602 - protein, 269 aa, Artificial Sequence
  Synthetic polypeptide
WALWYTLVIPFTLEAEAGESLEPSRMRLQTAVNAQSGVCTPAGGLVTGVLVLLSLDYLTSLFYYIPKSALAAVIIMAVAPLFDTKIFRTLWRVKRLDLLPLCVTFLLCFWEVQYGILAGALVSLLMLLHSAARPETKVSEGPVLVLQPASGLSFPAMEALREEILSRALEVSPPRCLVLECTHVCSIDYTVVLGLGELLQDFQKQGVALAFVGLQVPVLRVLLSADLKGFQYFSTLEEAEKHLRQEPGTQPYNIREDSILDQKVALLKA

SEQ ID NO: 16603 - protein, 14 aa, Artificial Sequence
  Synthetic polypeptide
KTFVANMFDEGRNN

SEQ ID NO: 16604 - protein, 55 aa, Artificial Sequence
  Synthetic polypeptide
KTFVANMFDEGRNNFEGEVTKENLLDFIKHNQLPLVIEFTEQTAPKIFGGEIKTH

SEQ ID NO: 16605 - protein, 76 aa, Artificial Sequence
  Synthetic polypeptide
KTFVANMFDEGRNNFEGEVTKENLLDFIKHNQLPLVIEFTEQTAPKIFGGEIKTHILLFLPKSVSDYDGKLSNFKT

SEQ ID NO: 16606 - protein, 113 aa, Artificial Sequence
  Synthetic polypeptide
KTFVANMFDEGRNNFEGEVTKENLLDFIKHNQLPLVIEFTEQTAPKIFGGEIKTHILLFLPKSVSDYDGKLSNFKTAAESFKGKILFIFIDSDHTDNQRILEFFGLKKEECPA

SEQ ID NO: 16607 - protein, 150 aa, Artificial Sequence
  Synthetic polypeptide
KTFVANMFDEGRNNFEGEVTKENLLDFIKHNQLPLVIEFTEQTAPKIFGGEIKTHILLFLPKSVSDYDGKLSNFKTAAESFKGKILFIFIDSDHTDNQRILEFFGLKKEECPAVRLITLEEEMTKYKPESEELTAERITEFCHRFLEGKI

SEQ ID NO: 16608 - protein, 307 aa, Artificial Sequence
  Synthetic polypeptide
KTFVANMFDEGRNNFEGEVTKENLLDFIKHNQLPLVIEFTEQTAPKIFGGEIKTHILLFLPKSVSDYDGKLSNFKTAAESFKGKILFIFIDSDHTDNQRILEFFGLKKEECPAVRLITLEEEMTKYKPESEELTAERITEFCHRFLEGKIKPHLMSQELPEDWDKQPVKVLVGKNFEDVAFDEKKNVFVEFYAPWCGHCKQLAPIWDKLGETYKDHENIVIAKMDSTANEVEAVKVHSFPTLKFFPASADRTVIDYNGERTLDGFKKFLESGGQDGAGDDDDLEDLEEAEEPDMEEDDDQKAVKDEL

SEQ ID NO: 16609 - protein, 8 aa, Artificial Sequence
  Synthetic polypeptide
QDLRGQHV

SEQ ID NO: 16610 - protein, 14 aa, Artificial Sequence
  Synthetic polypeptide
SRPSWPTCLMKAGT

SEQ ID NO: 16611 - protein, 56 aa, Artificial Sequence
  Synthetic polypeptide
SRPSWPTCLMKAGTTLKGRSPRRTCWTLSNTTSCPLSSSSPSRQPRRFLEVKSRLT

SEQ ID NO: 16612 - protein, 71 aa, Artificial Sequence
  Synthetic polypeptide
SRPSWPTCLMKAGTTLKGRSPRRTCWTLSNTTSCPLSSSSPSRQPRRFLEVKSRLTSCCSCPRVCLTMTAN

SEQ ID NO: 16613 - protein, 28 aa, Artificial Sequence
  Synthetic polypeptide
PGAVAHAYNPSTLGGRGGQITSLMKAGT

SEQ ID NO: 16614 - protein, 70 aa, Artificial Sequence
  Synthetic polypeptide
PGAVAHAYNPSTLGGRGGQITSLMKAGTTLKGRSPRRTCWTLSNTTSCPLSSSSPSRQPRRFLEVKSRLT

SEQ ID NO: 16615 - protein, 85 aa, Artificial Sequence
  Synthetic polypeptide
PGAVAHAYNPSTLGGRGGQITSLMKAGTTLKGRSPRRTCWTLSNTTSCPLSSSSPSRQPRRFLEVKSRLTSCCSCPRVCLTMTAN

SEQ ID NO: 16616 - protein, 22 aa, Artificial Sequence
  Synthetic polypeptide
RARWLTPIIPALWEAEAGRSRV

SEQ ID NO: 16617 - protein, 20 aa, Artificial Sequence
  Synthetic polypeptide
SQHFGRPRRADHEFDEGRNN

SEQ ID NO: 16618 - protein, 61 aa, Artificial Sequence
  Synthetic polypeptide
SQHFGRPRRADHEFDEGRNNFEGEVTKENLLDFIKHNQLPLVIEFTEQTAPKIFGGEIKTH

SEQ ID NO: 16619 - protein, 82 aa, Artificial Sequence
  Synthetic polypeptide
SQHFGRPRRADHEFDEGRNNFEGEVTKENLLDFIKHNQLPLVIEFTEQTAPKIFGGEIKTHILLFLPKSVSDYDGKLSNFKT

SEQ ID NO: 16620 - protein, 119 aa, Artificial Sequence
  Synthetic polypeptide
SQHFGRPRRADHEFDEGRNNFEGEVTKENLLDFIKHNQLPLVIEFTEQTAPKIFGGEIKTHILLFLPKSVSDYDGKLSNFKTAAESFKGKILFIFIDSDHTDNQRILEFFGLKKEECPA

SEQ ID NO: 16621 - protein, 156 aa, Artificial Sequence
  Synthetic polypeptide
SQHFGRPRRADHEFDEGRNNFEGEVTKENLLDFIKHNQLPLVIEFTEQTAPKIFGGEIKTHILLFLPKSVSDYDGKLSNFKTAAESFKGKILFIFIDSDHTDNQRILEFFGLKKEECPAVRLITLEEEMTKYKPESEELTAERITEFCHRFLEGKI

SEQ ID NO: 16622 - protein, 313 aa, Artificial Sequence
  Synthetic polypeptide
SQHFGRPRRADHEFDEGRNNFEGEVTKENLLDFIKHNQLPLVIEFTEQTAPKIFGGEIKTHILLFLPKSVSDYDGKLSNFKTAAESFKGKILFIFIDSDHTDNQRILEFFGLKKEECPAVRLITLEEEMTKYKPESEELTAERITEFCHRFLEGKIKPHLMSQELPEDWDKQPVKVLVGKNFEDVAFDEKKNVFVEFYAPWCGHCKQLAPIWDKLGETYKDHENIVIAKMDSTANEVEAVKVHSFPTLKFFPASADRTVIDYNGERTLDGFKKFLESGGQDGAGDDDDLEDLEEAEEPDMEEDDDQKAVKDEL

SEQ ID NO: 16623 - protein, 37 aa, Artificial Sequence
  Synthetic polypeptide
ARWRTCWTLSNTTSCPLSSSSPSRQPRRFLEVKSRLT

SEQ ID NO: 16624 - protein, 52 aa, Artificial Sequence
  Synthetic polypeptide
ARWRTCWTLSNTTSCPLSSSSPSRQPRRFLEVKSRLTSCCSCPRVCLTMTAN

SEQ ID NO: 16625 - protein, 32 aa, Artificial Sequence
  Synthetic polypeptide
ARWRTCWTLSNTTSCPLSSSSPSRVCLTMTAN

SEQ ID NO: 16626 - protein, 32 aa, Artificial Sequence
  Synthetic polypeptide
GHGGEPAGLYQTQPAAPCHRVHRADSPEDFWR

SEQ ID NO: 16627 - protein, 27 aa, Artificial Sequence
  Synthetic polypeptide
GHGGEPAGLYQTQPAAPCHRVHRAECV

SEQ ID NO: 16628 - protein, 269 aa, Artificial Sequence
  Synthetic polypeptide
GTVENLLDFIKHNQLPLVIEFTEQSVSDYDGKLSNFKTAAESFKGKILFIFIDSDHTDNQRILEFFGLKKEECPAVRLITLEEEMTKYKPESEELTAERITEFCHRFLEGKIKPHLMSQELPEDWDKQPVKVLVGKNFEDVAFDEKKNVFVEFYAPWCGHCKQLAPIWDKLGETYKDHENIVIAKMDSTANEVEAVKVHSFPTLKFFPASADRTVIDYNGERTLDGFKKFLESGGQDGAGDDDDLEDLEEAEEPDMEEDDDQKAVKDEL

SEQ ID NO: 16629 - protein, 37 aa, Artificial Sequence
  Synthetic polypeptide
GTVENLLDFIKHNQLPLVIEFTEQTAPKIFGGEIKTH

SEQ ID NO: 16630 - protein, 58 aa, Artificial Sequence
  Synthetic polypeptide
GTVENLLDFIKHNQLPLVIEFTEQTAPKIFGGEIKTHILLFLPKSVSDYDGKLSNFKT

SEQ ID NO: 16631 - protein, 95 aa, Artificial Sequence
  Synthetic polypeptide
GTVENLLDFIKHNQLPLVIEFTEQTAPKIFGGEIKTHILLFLPKSVSDYDGKLSNFKTAAESFKGKILFIFIDSDHTDNQRILEFFGLKKEECPA

SEQ ID NO: 16632 - protein, 132 aa, Artificial Sequence
  Synthetic polypeptide
GTVENLLDFIKHNQLPLVIEFTEQTAPKIFGGEIKTHILLFLPKSVSDYDGKLSNFKTAAESFKGKILFIFIDSDHTDNQRILEFFGLKKEECPAVRLITLEEEMTKYKPESEELTAERITEFCHRFLEGKI

SEQ ID NO: 16633 - protein, 289 aa, Artificial Sequence
  Synthetic polypeptide
GTVENLLDFIKHNQLPLVIEFTEQTAPKIFGGEIKTHILLFLPKSVSDYDGKLSNFKTAAESFKGKILFIFIDSDHTDNQRILEFFGLKKEECPAVRLITLEEEMTKYKPESEELTAERITEFCHRFLEGKIKPHLMSQELPEDWDKQPVKVLVGKNFEDVAFDEKKNVFVEFYAPWCGHCKQLAPIWDKLGETYKDHENIVIAKMDSTANEVEAVKVHSFPTLKFFPASADRTVIDYNGERTLDGFKKFLESGGQDGAGDDDDLEDLEEAEEPDMEEDDDQKAVKDEL

SEQ ID NO: 16634 - protein, 57 aa, Artificial Sequence
  Synthetic polypeptide
IWNTWQAFVMSGHPHHQMVRGRGGLQRHGDGAAGAKPGGPLQLLLQEIQPQNRPAAC

SEQ ID NO: 16635 - protein, 162 aa, Artificial Sequence
  Synthetic polypeptide
VGIPTIRWCGAEGDYNVMVMELLGPSLEDLFNFCSRKFSLKTVLLLADQMISRIEYIHSKNFIHRDVKPDNFLMGLGKKGNLVYIIDFGLAKKYRDARTHQHIPYRENKNLTGTARYASINTHLGIEQSRRDDLESLGYVLMYFNLGSLPWQGLKAATKRQK

SEQ ID NO: 16636 - protein, 353 aa, Artificial Sequence
  Synthetic polypeptide
VGIPTIRWCGAEGDYNVMVMELLGPSLEDLFNFCSRKFSLKTVLLLADQMISRIEYIHSKNFIHRDVKPDNFLMGLGKKGNLVYIIDFGLAKKYRDARTHQHIPYRENKNLTGTARYASINTHLGIEQSRRDDLESLGYVLMYFNLGSLPWQGLKAATKRQKYERISEKKMSTPIEVLCKGYPSEFATYLNFCRSLRFDDKPDYSYLRQLFRNLFHRQGFSYDYVFDWNMLKFGASRAADDAERERRDREERLRHSRNPATRGLPSTASGRLRGTQEVAPPTPLTPTSHTANTSPRPVSGMERERKVSMRLHRGAPVNISSSDLTGRQDTSRMSTSQIPGRVASSGLQSVVHR

SEQ ID NO: 16637 - protein, 347 aa, Artificial Sequence
  Synthetic polypeptide
VGIPTIRWCGAEGDYNVMVMELLGPSLEDLFNFCSRKFSLKTVLLLADQMISRIEYIHSKNFIHRDVKPDNFLMGLGKKGNLVYIIDFGLAKKYRDARTHQHIPYRENKNLTGTARYASINTHLGIEQSRRDDLESLGYVLMYFNLGSLPWQGLKAATKRQKYERISEKKMSTPIEVLCKGYPSEFATYLNFCRSLRFDDKPDYSYLRQLFRNLFHRQGFSYDYVFDWNMLKFGASRAADDAERERRDREERLRHSRNPATRGLPSTASGRLRGTQEVAPPTPLTPTSHTANTSPRPVSGMERERKVSMRLHRGAPVNISSSDLTGRQDTSRMSTSQNSIPFEHHGK

SEQ ID NO: 16638 - protein, 365 aa, Artificial Sequence
  Synthetic polypeptide
VGIPTIRWCGAEGDYNVMVMELLGPSLEDLFNFCSRKFSLKTVLLLADQMISRIEYIHSKNFIHRDVKPDNFLMGLGKKGNLVYIIDFGLAKKYRDARTHQHIPYRENKNLTGTARYASINTHLGIEQSRRDDLESLGYVLMYFNLGSLPWQGLKAATKRQKYERISEKKMSTPIEVLCKGYPSEFATYLNFCRSLRFDDKPDYSYLRQLFRNLFHRQGFSYDYVFDWNMLKFGASRAADDAERERRDREERLRHSRNPATRGLPSTASGRLRGTQEVAPPTPLTPTSHTANTSPRPVSGMERERKVSMRLHRGAPVNISSSDLTGRQDTSRMSTSQRSRDMASLRLHAARQGTRCRPQRPRRTY

SEQ ID NO: 16639 - protein, 64 aa, Artificial Sequence
  Synthetic polypeptide
VGIPTIRWCGAEGDYNVMVMELLGPSLEDLFNFCSRKFSLKTVLLLADQMNNPEEMTWSLWATC

SEQ ID NO: 16640 - protein, 46 aa, Artificial Sequence
  Synthetic polypeptide
VLGEAADSRAGAERKKVNLEHMAGICYEWASPPSDGAGQRGTTTSW

SEQ ID NO: 16641 - protein, 41 aa, Artificial Sequence
  Synthetic polypeptide
CLLKVKQNFVCASVGFLWGDSVFIFLGFERFSKASVTQRGL

SEQ ID NO: 16642 - protein, 101 aa, Artificial Sequence
  Synthetic polypeptide
CLLKVKQNFVCASVGFLWGDSVFIFLGFERFSKASVTQRGLGGQLMRQADLVIVPQMPPEHTVQGCHLSDVPMGARSCLLSGIKTIPHMSWTAGDLVALGV

SEQ ID NO: 16643 - protein, 66 aa, Artificial Sequence
  Synthetic polypeptide
CLLKVKQNFVCASVGFLWGDSVFIFLGFERFSKASVTQRGLGGQLMRQAVCVLIEKLSLSKMPFRG

SEQ ID NO: 16644 - protein, 73 aa, Artificial Sequence
  Synthetic polypeptide
CLLKVKQNFVCASVGFLWGDSVFIFLGFERFSKASVTQRGLGGQLMRQAVCVLIEKLSLSKMPFRGDTVIDGW

SEQ ID NO: 16645 - protein, 95 aa, Artificial Sequence
  Synthetic polypeptide
CLLKVKQNFVCASVGFLWGDSVFIFLGFERFSKASVTQRGLGGQLMRQAVCVLIEKLSLSKMPFRGDTVIDGWQWLINDTLRHLHLISSHSRQQM

SEQ ID NO: 16646 - protein, 162 aa, Artificial Sequence
  Synthetic polypeptide
CLLKVKQNFVCASVGFLWGDSVFIFLGFERFSKASVTQRGLGGQLMRQAVCVLIEKLSLSKMPFRGDTVIDGWQWLINDTLRHLHLISSHSRQQMKDAAVSALAALCSEYYMKEPGEADPAIQEELITQYLAELRNPEEMTRCGFSLALGALPGFLLKGRLQ

SEQ ID NO: 16647 - protein, 176 aa, Artificial Sequence
  Synthetic polypeptide
CLLKVKQNFVCASVGFLWGDSVFIFLGFERFSKASVTQRGLGGQLMRQAVCVLIEKLSLSKMPFRGDTVIDGWQWLINDTLRHLHLISSHSRQQMKDAAVSALAALCSEYYMKEPGEADPAIQEELITQYLAELRNPEEMTRCGFSLALGALPGFLLKGRLQQVLTGLRAVTHTSP

SEQ ID NO: 16648 - protein, 188 aa, Artificial Sequence
  Synthetic polypeptide
CLLKVKQNFVCASVGFLWGDSVFIFLGFERFSKASVTQRGLGGQLMRQAVCVLIEKLSLSKMPFRGDTVIDGWQWLINDTLRHLHLISSHSRQQMKDAAVSALAALCSEYYMKEPGEADPAIQEELITQYLAELRNPEEMTRCGFSLALGALPGFLLKGRLQQVLTGLRAVTHTSPEDVSFAESRRDG

SEQ ID NO: 16649 - protein, 600 aa, Artificial Sequence
  Synthetic polypeptide
CLLKVKQNFVCASVGFLWGDSVFIFLGFERFSKASVTQRGLGGQLMRQAVCVLIEKLSLSKMPFRGDTVIDGWQWLINDTLRHLHLISSHSRQQMKDAAVSALAALCSEYYMKEPGEADPAIQEELITQYLAELRNPEEMTRCGFSLALGALPGFLLKGRLQQVLTGLRAVTHTSPEDVSFAESRRDGLKAIARICQTVGVKAGAPDEAVCGENVSQIYCALLGCMDDYTTDSRGDVGTWVRKAAMTSLMDLTLLLARSQPELIEAHTCERIMCCVAQQASEKIDRFRAHAASVFLTLLHFDSPPIPHVPHRGELEKLFPRSDVASVNWSAPSQAFPRITQLLGLPTYRYHVLLGLVVSLGGLTESTIRHSTQSLFEYMKGIQSDPQALGSFSGTLLQIFEDNLLNERVSVPLLKTLDHVLTHGCFDIFTTEEDHPFAVKLLALCKKEIKNSKDIQKLLSGIAVDFPSATLVCVGTVQMYAHTHLRLGAPGPHCAHGSALPRFCEMVQFPGDVRRQALLQLCLLLCHRFPLIRKTTASQVYETLLTYSDVVGADVLDEVVTVLSDTAWDAELAVVREQRNRLCDLLGVPRPQLVPQPGAC

SEQ ID NO: 16650 - protein, 562 aa, Artificial Sequence
  Synthetic polypeptide
CLLKVKQNFVCASVGFLWGDSVFIFLGFERFSKASVTQRGLGGQLMRQAVCVLIEKLSLSKMPFRGDTVIDGWQWLINDTLRHLHLISSHSRQQMKDAAVSALAALCSEYYMKEPGEADPAIQEELITQYLAELRNPEEMTRCGFSLALGALPGFLLKGRLQQVLTGLRAVTHTSPEDVSFAESRRDGLKAIARICQTVGVKAGAPDEAVCGENVSQIYCALLGCMDDYTTDSRGDVGTWVRKAAMTSLMDLTLLLARSQPELIEAHTCERIMCCVAQQASEKIDRFRAHAASVFLTLLHFDSPPIPHVPHRGELEKLFPRSDVASVNWSAPSQAFPRITQLLGLPTYRYHVLLGLVVSLGGLTESTIRHSTQSLFEYMKGIQSDPQALGSFSGTLLQIFEDNLLNERVSVPLLKTLDHVLTHGCFDIFTTEEDHPFAVKLLALCKKEIKNSKDIQKLLSGIAVFCEMVQFPGDVRRQALLQLCLLLCHRFPLIRKTTASQVYETLLTYSDVVGADVLDEVVTVLSDTAWDAELAVVREQRNRLCDLLGVPRPQLVPQPGAC

SEQ ID NO: 16651 - protein, 12 aa, Artificial Sequence
  Synthetic polypeptide
EILKGFCDPEGS

SEQ ID NO: 16652 - protein, 51 aa, Artificial Sequence
  Synthetic polypeptide
EILKGFCDPEGSGRTAHETSRLGHCPSDASRAHGAGVSPFRRTHGCPELPP

SEQ ID NO: 16653 - protein, 35 aa, Artificial Sequence
  Synthetic polypeptide
EILKGFCDPEGSGRTAHETSSVCFNRKVVTFQNAL

SEQ ID NO: 16654 - protein, 5 aa, Artificial Sequence
  Synthetic polypeptide
PRGVW

SEQ ID NO: 16655 - protein, 9 aa, Artificial Sequence
  Synthetic polypeptide
PRGVWEDSS

SEQ ID NO: 16656 - protein, 741 aa, Artificial Sequence
  Synthetic polypeptide
PGAVAHACDPSTLGGRRGWITSTVLLLNPVEVQAEFLAVANKLSTPGHSPHSAYTTLLLHAFQATFGAHCDVPGLHCRLQAKTLAELEDIFTETAEAQELASGIGDAAEARRWLRTKLQAVGEKAGFPGVLDTAKPGKLHTIPIPVARCYTYSWSQDSFDILQEILLKEQELLQPGILGDDEEEEEEEEEVEEDLETDGHCAERDSLLSTSSLASHDSTLSLASSQASGPALSRHLLTSFVSGLSDGMDSGYVEDSEESSSEWPWRRGSQERRGHRRPGQKFIRIYKLFKSTSQLVLRRDSRSLEGSSDTALPLRRAGSLCSPLDEPVSPPSRAQRSRSLPQPKLGTQLPSWLLAPASRPQRRRPFLSGDEDPKASTLRVVVFGSDRISGKVARAYSNLRRLENNRPLLTRFFKLQFFYVPVKRSHGTSPGACPPPRSQTPSPPTDSPRHASPGELGTTPWEESTNDISHYLGMLDPWYERNVLGLMHLPPEVLCQQSLKAEAQALEGSPTQLPILADMLLYYCRFAARPVLLQVYQTELTFITGEKTTEIFIHSLELGHSAATRAIKASGPGSKRLGIDGDREAVPLTLQIIYSKGAISGRSRWSNLEKVCTSVNLNKACRKQEELDSSMEALTLNLTEVVKRQNSKSKKGFNQISTSQIKVDKVQIIGSNSCPFAVCLDQDERKILQSVVRCEVSPCYKPEKSDLSSPPQTPPDLPAQAAPDLCSLLCLPIMTFSGALP

SEQ ID NO: 16657 - protein, 740 aa, Artificial Sequence
  Synthetic polypeptide
PGAVAHACDPSTLGGRRGWITSTVLLLNPVEVQAEFLAVANKLSTPGHSPHSAYTTLLLHAFQATFGAHCDVPGLHCRLQAKTLAELEDIFTETAEAQELASGIGDAAEARRWLRTKLQAVGEKAGFPGVLDTAKPGKLHTIPIPVARCYTYSWSQDSFDILQEILLKEQELLQPGILGDDEEEEEEEEEVEEDLETDGHCAERDSLLSTSSLASHDSTLSLASSQASGPALSRHLLTSFVSGLSDGMDSGYVEDSEESSSEWPWRRGSQERRGHRRPGQKFIRIYKLFKSTSQLVLRRDSRSLEGSSDTALPLRRAGSLCSPLDEPVSPPSRAQRSRSLPQPKLGTQLPSWLLAPASRPQRRRPFLSGDEDPKASTLRVVVFGSDRISGKVARAYSNLRRLENNRPLLTRFFKLQFFYVPVKRSHGTSPGACPPPRSQTPSPPTDSPRHASPGELGTTPWEESTNDISHYLGMLDPWYERNVLGLMHLPPEVLCQSLKAEAQALEGSPTQLPILADMLLYYCRFAARPVLLQVYQTELTFITGEKTTEIFIHSLELGHSAATRAIKASGPGSKRLGIDGDREAVPLTLQIIYSKGAISGRSRWSNLEKVCTSVNLNKACRKQEELDSSMEALTLNLTEVVKRQNSKSKKGFNQISTSQIKVDKVQIIGSNSCPFAVCLDQDERKILQSVVRCEVSPCYKPEKSDLSSPPQTPPDLPAQAAPDLCSLLCLPIMTFSGALP

SEQ ID NO: 16658 - protein, 26 aa, Artificial Sequence
  Synthetic polypeptide
RARWLTPVIPALWEADAGGSRAPCCC

SEQ ID NO: 16659 - protein, 32 aa, Artificial Sequence
  Synthetic polypeptide
SQHFGRPTRVDHEHRAAAEPSGSAGRVPCCSQ

SEQ ID NO: 16660 - protein, 25 aa, Artificial Sequence
  Synthetic polypeptide
CCRDDHGDFTAACGYRGCCSLADQL

SEQ ID NO: 16661 - protein, 51 aa, Artificial Sequence
  Synthetic polypeptide
IYKEERKSLDERNEERIEGQRLSGRTDAAGMIMVILLLLVAIVVVAVWPTN

SEQ ID NO: 16662 - protein, 8 aa, Artificial Sequence
  Synthetic polypeptide
VGELMLQG

SEQ ID NO: 16663 - protein, 39 aa, Artificial Sequence
  Synthetic polypeptide
DQITILAPLWNHDHACIACRIIYRSDEHHPPILPPKADL

SEQ ID NO: 16664 - protein, 52 aa, Artificial Sequence
  Synthetic polypeptide
DQITILAPLWNHDHACIACRIIYRSDEHHPPILPPKADLTIGLHGEWVSQRC

SEQ ID NO: 16665 - protein, 266 aa, Artificial Sequence
  Synthetic polypeptide
DQITILAPLWNHDHACIACRIIYRSDEHHPPILPPKADLTIGLHGEWVSQRCEVRPEVLFLTRHFIFHDNNNTWEGHYYHYSDPVCKHPTFSIYARGRYSRGVLSSRVMGGTEFVFKVNHMKVTPMDAATASLLNVFNGNECGAEGSWQVGIQQDVTHTNGCVALGIKLPHTEYEIFKMEQDARGRYLLFNGQRPSDGSSPDRPEKRATSYQMPLVQCASSSPRAEDLAEDSGSSLYGRAPGRHTWSLLLAALACLVPLLHWNIRR

SEQ ID NO: 16666 - protein, 43 aa, Artificial Sequence
  Synthetic polypeptide
QQVLRPNYHPGSTLEPRPCLHRLSDHLSVRRAPPSHPAPKGRP

SEQ ID NO: 16667 - protein, 56 aa, Artificial Sequence
  Synthetic polypeptide
QQVLRPNYHPGSTLEPRPCLHRLSDHLSVRRAPPSHPAPKGRPDHRPARGVGEPAL

SEQ ID NO: 16668 - protein, 43 aa, Artificial Sequence
  Synthetic polypeptide
SASPKTKLPSWLHFGTTTMPASPVGSSIGQTSTTLPSCPQRQT

SEQ ID NO: 16669 - protein, 131 aa, Artificial Sequence
  Synthetic polypeptide
AKIVLPHSSLGDRVIESLGIIIYKALDYGLKENEERELSPPLEQLIDHMANTVEADGSNDEGYEAAEEGLGDEDEKRKISAIRSYRDVMKLCAAHLPTESDAPNHYQAVCRALFAETMELHTFLTKIKSAK

SEQ ID NO: 16670 - protein, 138 aa, Artificial Sequence
  Synthetic polypeptide
AKIVLPHSSLGDRVIESLGIIIYKALDYGLKENEERELSPPLEQLIDHMANTVEADGSNDEGYEAAEEGLGDEDEKRKISAIRSYRDVMKLCAAHLPTESDAPNHYQAVCRALFAETMELHTFLTKIKSAKENLKKIQ

SEQ ID NO: 16671 - protein, 206 aa, Artificial Sequence
  Synthetic polypeptide
AKIVLPHSSLGDRVIESLGIIIYKALDYGLKENEERELSPPLEQLIDHMANTVEADGSNDEGYEAAEEGLGDEDEKRKISAIRSYRDVMKLCAAHLPTESDAPNHYQAVCRALFAETMELHTFLTKIKSAKENLKKIQEMEKSDESSTDLEELKNADWARFWVQVMRDLRNGVKLKKVQERQYNPLPIEYQLTPYEMLMDDIRCKR

SEQ ID NO: 16672 - protein, 645 aa, Artificial Sequence
  Synthetic polypeptide
AKIVLPHSSLGDRVIESLGIIIYKALDYGLKENEERELSPPLEQLIDHMANTVEADGSNDEGYEAAEEGLGDEDEKRKISAIRSYRDVMKLCAAHLPTESDAPNHYQAVCRALFAETMELHTFLTKIKSAKENLKKIQEMEKSDESSTDLEELKNADWARFWVQVMRDLRNGVKLKKVQERQYNPLPIEYQLTPYEMLMDDIRCKRYTLRKVMVNGDIPPRLKKSAHEIILDFIRSRPPLNPVSARKLKPTPPRPRSLHERILEEIKAERKLRPVSPEEIRRSRLAMRPLSMSYSFDLSDVTTPESTKNLVESSMVNGGLTSQTKENGLSTSQQVPAQRKKLLRAPTLAELDSSESEEETLHKSTSSSSVSPSFPEEPVLEAVSTRKKPPKFLPISSTPQPERRQPPQRRHSIEKETPTNVRQFLPPSRQSSRSLEEFCYPVECLALTVEEVMHIRQVLVKAELEKYQQYKDIYTALKKGKLCFCCRTRRFSFFTWSYTCQFCKRPVCSQCCKKMRLPSKPYSTLPIFSLGPSALQRGESSMRSEKPSTAHHRPLRSIARFSSKSKSMDKSDEELQFPKELMEDWSTMEVCVDCKKFISEIISSSRRSLVLANKRARLKRKTQSFYMSSPGPSEYCPSERTISEI

SEQ ID NO: 16673 - protein, 631 aa, Artificial Sequence
  Synthetic polypeptide
AKIVLPHSSLGDRVIESLGIIIYKALDYGLKENEERELSPPLEQLIDHMANTVEADGSNDEGYEAAEEGLGDEDEKRKISAIRSYRDVMKLCAAHLPTESDAPNHYQAVCRALFAETMELHTFLTKIKSAKENLKKIQEMEKSDESSTDLEELKNADWARFWVQVMRDLRNGVKLKKVQERQYNPLPIEYQLTPYEMLMDDIRCKRYTLRKVMVNGDIPPRLKKSAHEIILDFIRSRPPLNPVSARKLKPTPPRPRSLHERILEEIKAERKLRPVSPEEIRRSRLDVTTPESTKNLVESSMVNGGLTSQTKENGLSTSQQVPAQRKKLLRAPTLAELDSSESEEETLHKSTSSSSVSPSFPEEPVLEAVSTRKKPPKFLPISSTPQPERRQPPQRRHSIEKETPTNVRQFLPPSRQSSRSLEEFCYPVECLALTVEEVMHIRQVLVKAELEKYQQYKDIYTALKKGKLCFCCRTRRFSFFTWSYTCQFCKRPVCSQCCKKMRLPSKPYSTLPIFSLGPSALQRGESSMRSEKPSTAHHRPLRSIARFSSKSKSMDKSDEELQFPKELMEDWSTMEVCVDCKKFISEIISSSRRSLVLANKRARLKRKTQSFYMSSPGPSEYCPSERTISEI

SEQ ID NO: 16674 - protein, 51 aa, Artificial Sequence
  Synthetic polypeptide
SQLLGRLRQKNHLNLGGGGCSEPRSCYRIPAWATESLNLWELLFIKHWTMV

SEQ ID NO: 16675 - protein, 23 aa, Artificial Sequence
  Synthetic polypeptide
TWEVEVAVSQDRATAFQPGRQSH

SEQ ID NO: 16676 - protein, 56 aa, Artificial Sequence
  Synthetic polypeptide
AQEFKTSLDNKVKCAQYWPTDDQEMLFKETGFSVKLLSEDVKSYYTVHLLQLENIN

SEQ ID NO: 16677 - protein, 244 aa, Artificial Sequence
  Synthetic polypeptide
AQEFKTSLDNKVKCAQYWPTDDQEMLFKETGFSVKLLSEDVKSYYTVHLLQLENINSGETRTISHFHYTTWPDFGVPESPASFLNFLFKVRESGSLNPDHGPAVIHCSAGIGRSGTFSLVDTCLVLMEKGDDINIKQVLLNMRKYRMGLIQTPDQLRFSYMAIIEGAKCIKGDSSIQKRWKELSKEDLSPAFDHSPNKIMTEKYNGNRIGLEEEKLTGDRCTGLSSKMQDTMEENSERPRLTDT

SEQ ID NO: 16678 - protein, 278 aa, Artificial Sequence
  Synthetic polypeptide
AQEFKTSLDNKVKCAQYWPTDDQEMLFKETGFSVKLLSEDVKSYYTVHLLQLENINSGETRTISHFHYTTWPDFGVPESPASFLNFLFKVRESGSLNPDHGPAVIHCSAGIGRSGTFSLVDTCLVLMEKGDDINIKQVLLNMRKYRMGLIQTPDQLRFSYMAIIEGAKCIKGDSSIQKRWKELSKEDLSPAFDHSPNKIMTEKYNGNRIGLEEEKLTGDRCTGLSSKMQDTMEENSESALRKRIREDRKATTAQKVQQMKQRLNENERKRKRPRLTDT

SEQ ID NO: 16679 - protein, 306 aa, Artificial Sequence
  Synthetic polypeptide
AQEFKTSLDNKVKCAQYWPTDDQEMLFKETGFSVKLLSEDVKSYYTVHLLQLENINSGETRTISHFHYTTWPDFGVPESPASFLNFLFKVRESGSLNPDHGPAVIHCSAGIGRSGTFSLVDTCLVLMEKGDDINIKQVLLNMRKYRMGLIQTPDQLRFSYMAIIEGAKCIKGDSSIQKRWKELSKEDLSPAFDHSPNKIMTEKYNGNRIGLEEEKLTGDRCTGLSSKMQDTMEENSESALRKRIREDRKATTAQKVQQMKQRLNENERKRKRWLYWQPILTKMGFMSVILVGAFVGWTLFFQQNAL

SEQ ID NO: 16680 - protein, 58 aa, Artificial Sequence
  Synthetic polypeptide
AQEFKTSLDNKVKCAQYWPTDDQEMLFKETGFSVKLLSEDVKSYYTVHLLQLENINVR

SEQ ID NO: 16681 - protein, 301 aa, Artificial Sequence
  Synthetic polypeptide
AQEFKTSLDNKVKCAQYWPTDDQEMLFKETGFSVKLLSEDVKSYYTVHLLQLENINYIENLWITLYLKLLMLDVKRSLKSGETRTISHFHYTTWPDFGVPESPASFLNFLFKVRESGSLNPDHGPAVIHCSAGIGRSGTFSLVDTCLVLMEKGDDINIKQVLLNMRKYRMGLIQTPDQLRFSYMAIIEGAKCIKGDSSIQKRWKELSKEDLSPAFDHSPNKIMTEKYNGNRIGLEEEKLTGDRCTGLSSKMQDTMEENSESALRKRIREDRKATTAQKVQQMKQRLNENERKRKRPRLTDT

SEQ ID NO: 16682 - protein, 56 aa, Artificial Sequence
  Synthetic polypeptide
GQVGGLTPIIPALWEAEAGGSLEPRNSKPASTTKLNVHSTGQQMTKRCCLKKQDSV

SEQ ID NO: 16683 - protein, 25 aa, Artificial Sequence
  Synthetic polypeptide
SQHFGRLRQEGHLSPGIQNQPRQQS

SEQ ID NO: 16684 - protein, 52 aa, Artificial Sequence
  Synthetic polypeptide
EFSRGRADRWLGVEWGRVCLPRGTQNLCADGIDDHSRVKLQNAENDYINASL

SEQ ID NO: 16685 - protein, 144 aa, Artificial Sequence
  Synthetic polypeptide
EFSRGRADRWLGVEWGRVCLPRGTQNLCADGIDDHSRVKLQNAENDYINASLVDIEEAQRSYILTQGPLPNTCCHFWLMVWQQKTKAVVMLNRIVEKESVKCAQYWPTDDQEMLFKETGFSVKLLSEDVKSYYTVHLLQLENIN

SEQ ID NO: 16686 - protein, 332 aa, Artificial Sequence
  Synthetic polypeptide
EFSRGRADRWLGVEWGRVCLPRGTQNLCADGIDDHSRVKLQNAENDYINASLVDIEEAQRSYILTQGPLPNTCCHFWLMVWQQKTKAVVMLNRIVEKESVKCAQYWPTDDQEMLFKETGFSVKLLSEDVKSYYTVHLLQLENINSGETRTISHFHYTTWPDFGVPESPASFLNFLFKVRESGSLNPDHGPAVIHCSAGIGRSGTFSLVDTCLVLMEKGDDINIKQVLLNMRKYRMGLIQTPDQLRFSYMAIIEGAKCIKGDSSIQKRWKELSKEDLSPAFDHSPNKIMTEKYNGNRIGLEEEKLTGDRCTGLSSKMQDTMEENSERPRLTDT

SEQ ID NO: 16687 - protein, 366 aa, Artificial Sequence
  Synthetic polypeptide
EFSRGRADRWLGVEWGRVCLPRGTQNLCADGIDDHSRVKLQNAENDYINASLVDIEEAQRSYILTQGPLPNTCCHFWLMVWQQKTKAVVMLNRIVEKESVKCAQYWPTDDQEMLFKETGFSVKLLSEDVKSYYTVHLLQLENINSGETRTISHFHYTTWPDFGVPESPASFLNFLFKVRESGSLNPDHGPAVIHCSAGIGRSGTFSLVDTCLVLMEKGDDINIKQVLLNMRKYRMGLIQTPDQLRFSYMAIIEGAKCIKGDSSIQKRWKELSKEDLSPAFDHSPNKIMTEKYNGNRIGLEEEKLTGDRCTGLSSKMQDTMEENSESALRKRIREDRKATTAQKVQQMKQRLNENERKRKRPRLTDT

SEQ ID NO: 16688 - protein, 394 aa, Artificial Sequence
  Synthetic polypeptide
EFSRGRADRWLGVEWGRVCLPRGTQNLCADGIDDHSRVKLQNAENDYINASLVDIEEAQRSYILTQGPLPNTCCHFWLMVWQQKTKAVVMLNRIVEKESVKCAQYWPTDDQEMLFKETGFSVKLLSEDVKSYYTVHLLQLENINSGETRTISHFHYTTWPDFGVPESPASFLNFLFKVRESGSLNPDHGPAVIHCSAGIGRSGTFSLVDTCLVLMEKGDDINIKQVLLNMRKYRMGLIQTPDQLRFSYMAIIEGAKCIKGDSSIQKRWKELSKEDLSPAFDHSPNKIMTEKYNGNRIGLEEEKLTGDRCTGLSSKMQDTMEENSESALRKRIREDRKATTAQKVQQMKQRLNENERKRKRWLYWQPILTKMGFMSVILVGAFVGWTLFFQQNAL

SEQ ID NO: 16689 - protein, 389 aa, Artificial Sequence
  Synthetic polypeptide
EFSRGRADRWLGVEWGRVCLPRGTQNLCADGIDDHSRVKLQNAENDYINASLVDIEEAQRSYILTQGPLPNTCCHFWLMVWQQKTKAVVMLNRIVEKESVKCAQYWPTDDQEMLFKETGFSVKLLSEDVKSYYTVHLLQLENINYIENLWITLYLKLLMLDVKRSLKSGETRTISHFHYTTWPDFGVPESPASFLNFLFKVRESGSLNPDHGPAVIHCSAGIGRSGTFSLVDTCLVLMEKGDDINIKQVLLNMRKYRMGLIQTPDQLRFSYMAIIEGAKCIKGDSSIQKRWKELSKEDLSPAFDHSPNKIMTEKYNGNRIGLEEEKLTGDRCTGLSSKMQDTMEENSESALRKRIREDRKATTAQKVQQMKQRLNENERKRKRPRLTDT

SEQ ID NO: 16690 - protein, 3 aa, Artificial Sequence
  Synthetic polypeptide
WNR

SEQ ID NO: 16691 - protein, 21 aa, Artificial Sequence
  Synthetic polypeptide
FCSFCQFLSGFVCDPSKGNSK

SEQ ID NO: 16692 - protein, 191 aa, Artificial Sequence
  Synthetic polypeptide
GIQGSDLKGICKSPETAKFYVRVFPGISFLGDSVAFVSFLVDLSVIPQKEIRNESHDYPHRVAKFPENRNRNRYRDVSPYDHSRVKLQNAENDYINASLVDIEEAQRSYILTQGPLPNTCCHFWLMVWQQKTKAVVMLNRIVEKESVKCAQYWPTDDQEMLFKETGFSVKLLSEDVKSYYTVHLLQLENIN

SEQ ID NO: 16693 - protein, 379 aa, Artificial Sequence
  Synthetic polypeptide
GIQGSDLKGICKSPETAKFYVRVFPGISFLGDSVAFVSFLVDLSVIPQKEIRNESHDYPHRVAKFPENRNRNRYRDVSPYDHSRVKLQNAENDYINASLVDIEEAQRSYILTQGPLPNTCCHFWLMVWQQKTKAVVMLNRIVEKESVKCAQYWPTDDQEMLFKETGFSVKLLSEDVKSYYTVHLLQLENINSGETRTISHFHYTTWPDFGVPESPASFLNFLFKVRESGSLNPDHGPAVIHCSAGIGRSGTFSLVDTCLVLMEKGDDINIKQVLLNMRKYRMGLIQTPDQLRFSYMAIIEGAKCIKGDSSIQKRWKELSKEDLSPAFDHSPNKIMTEKYNGNRIGLEEEKLTGDRCTGLSSKMQDTMEENSERPRLTDT

SEQ ID NO: 16694 - protein, 413 aa, Artificial Sequence
  Synthetic polypeptide
GIQGSDLKGICKSPETAKFYVRVFPGISFLGDSVAFVSFLVDLSVIPQKEIRNESHDYPHRVAKFPENRNRNRYRDVSPYDHSRVKLQNAENDYINASLVDIEEAQRSYILTQGPLPNTCCHFWLMVWQQKTKAVVMLNRIVEKESVKCAQYWPTDDQEMLFKETGFSVKLLSEDVKSYYTVHLLQLENINSGETRTISHFHYTTWPDFGVPESPASFLNFLFKVRESGSLNPDHGPAVIHCSAGIGRSGTFSLVDTCLVLMEKGDDINIKQVLLNMRKYRMGLIQTPDQLRFSYMAIIEGAKCIKGDSSIQKRWKELSKEDLSPAFDHSPNKIMTEKYNGNRIGLEEEKLTGDRCTGLSSKMQDTMEENSESALRKRIREDRKATTAQKVQQMKQRLNENERKRKRPRLTDT

SEQ ID NO: 16695 - protein, 441 aa, Artificial Sequence
  Synthetic polypeptide
GIQGSDLKGICKSPETAKFYVRVFPGISFLGDSVAFVSFLVDLSVIPQKEIRNESHDYPHRVAKFPENRNRNRYRDVSPYDHSRVKLQNAENDYINASLVDIEEAQRSYILTQGPLPNTCCHFWLMVWQQKTKAVVMLNRIVEKESVKCAQYWPTDDQEMLFKETGFSVKLLSEDVKSYYTVHLLQLENINSGETRTISHFHYTTWPDFGVPESPASFLNFLFKVRESGSLNPDHGPAVIHCSAGIGRSGTFSLVDTCLVLMEKGDDINIKQVLLNMRKYRMGLIQTPDQLRFSYMAIIEGAKCIKGDSSIQKRWKELSKEDLSPAFDHSPNKIMTEKYNGNRIGLEEEKLTGDRCTGLSSKMQDTMEENSESALRKRIREDRKATTAQKVQQMKQRLNENERKRKRWLYWQPILTKMGFMSVILVGAFVGWTLFFQQNAL

SEQ ID NO: 16696 - protein, 436 aa, Artificial Sequence
  Synthetic polypeptide
GIQGSDLKGICKSPETAKFYVRVFPGISFLGDSVAFVSFLVDLSVIPQKEIRNESHDYPHRVAKFPENRNRNRYRDVSPYDHSRVKLQNAENDYINASLVDIEEAQRSYILTQGPLPNTCCHFWLMVWQQKTKAVVMLNRIVEKESVKCAQYWPTDDQEMLFKETGFSVKLLSEDVKSYYTVHLLQLENINYIENLWITLYLKLLMLDVKRSLKSGETRTISHFHYTTWPDFGVPESPASFLNFLFKVRESGSLNPDHGPAVIHCSAGIGRSGTFSLVDTCLVLMEKGDDINIKQVLLNMRKYRMGLIQTPDQLRFSYMAIIEGAKCIKGDSSIQKRWKELSKEDLSPAFDHSPNKIMTEKYNGNRIGLEEEKLTGDRCTGLSSKMQDTMEENSESALRKRIREDRKATTAQKVQQMKQRLNENERKRKRPRLTDT

SEQ ID NO: 16697 - protein, 31 aa, Artificial Sequence
  Synthetic polypeptide
SLKRKFEMSPMTILIEWPSFQKTEIETDTEM

SEQ ID NO: 16698 - protein, 911 aa, Artificial Sequence
  Synthetic polypeptide
NLKSLNVDDKRTSNIKLDKIMKELDEEGNQRRNLESTVSQIEKEKMLLQHRINEYQRKAEQENEKRRNVENEVSTLKDQLEDLKKVSQNSQLANEKLSQLQKQLEEANDLLRTESDTAVRLRKSHTEMSKSISQLESLNRELQERNRILENSKSQTDKDYYQLQAILEAERRDRGHDSEMIGDLQARITSLQEEVKHLKHNLEKVEGERKEAQDMLNHSEKEKNNLEIDLNYKLKSLQQRLEQEVNEHKVTKARLTDKHQSIEEAKSVAMCEMEKKLKEEREAREKAENRVVQIEKQCSMLDVDLKQSQQKLEHLTGNKERMEDEVKNLTLQLEQESNKRLLLQNELKTQAFEADNLKGLEKQMKQEINTLLEAKRLLEFELAQLTKQYRGNEGQMRELQDQLEAEQYFSTLYKTQVKELKEEIEEKNRENLKKIQELQNEKETLATQLDLAETKAESEQLARGLLEEQYFELTQESKKAASRNRQEITDKDHTVSRLEEANSMLTKDIEILRRENEELTEKMKKAEEEYKLEKEEEISNLKAAFEKNINTERTLKTQAVNKLAEIMNRKDFKIDRKKANTQDLRKKEKENRKLQLELNQEREKFNQMVVKHQKELNDMQAQLVEECAHRNELQMQLASKESDIEQLRAKLLDLSDSTSVASFPSADETDGNLPESRIEGWLSVPNRGNIKRYGWKKQYVVVSSKKILFYNDEQDKEQSNPSMVLDIDKLFHVRPVTQGDVYRAETEEIPKIFQILYANEGECRKDVEMEPVQQAEKTNFQNHKGHEFIPTLYHFPANCDACAKPLWHVFKPPPALECRRCHVKCHRDHLDKKEDLICPCKVSYDVTSARDMLLLACSQDEQKKWVTHLVKKIPKNPPSGFVRASPRTLSTRSTANQSFRKVVKNTSGKTS

SEQ ID NO: 16699 - protein, 16 aa, Artificial Sequence
  Synthetic polypeptide
QKNLKHKTRQDNERIG

SEQ ID NO: 16700 - protein, 9 aa, Artificial Sequence
  Synthetic polypeptide
TWMTKEPQT

SEQ ID NO: 16701 - protein, 811 aa, Artificial Sequence
  Synthetic polypeptide
GWARWLTPVIPALWEAQSDLKCVQDAKGGSFYRDHCPVLGEQNGNRNPGGLQIGDLVNIDLDLEIVQSLQHGHGGWTDGMFETLTTTGTVCGIDEDHDIVVQYPSGNRWTFNPAVLTKANIVRSGDAAQGAEGGTSQFQVGDLVQVCYDLERIKLLQRGHGEWAEAMLPTLGKVGRVQQIYSDSDLKVEVCGTSWTYNPAAVSKVASAGSAISNASGERLSQLLKKLFETQESGDLNEELVKAAANGDVAKVEDLLKRPDVDVNGQCAGHTAMQAASQNGHVDILKLLLKQNVDVEAEDKDGDRAVHHAAFGDEGAVIEVLHRGSADLNARNKRRQTPLHIAVNKGHLQVVKTLLDFGCHPSLQDSEGDTPLHDAISKKRDDILAVLLEAGADVTITNNNGFNALHHAALRGNPSAMRVLLSKLPRPWIVDEKKDDGYTALHLAALNNHVEVAELLVHQGNANLDIQNVNQQTALHLAVERQHTQIVRLLVRAGAKLDIQDKDGDTPLHEALRHHTLSQLRQLQDMQDVGKVDAAWEPSKNTLIMGLGTQGAEKKSAASIACFLAANGADLSIRNKKGQSPLDLCPDPNLCKALAKCHKEKVSGQVGSRSPSMISNDSETLEECMVCSDMKRDTLFGPCGHIATCSLCSPRVKKCLICKEQVQSRTKIEECVVCSDKKAAVLFQPCGHMCACENCANLMKKCVQCRAVVERRVPFIMCCGGKSSEDATDDISSGNIPVLQKDKDNTNVNADVQKLQQQLQDIKEQTMCPVCLDRLKNMIFLCGHGTCQLCGDRMSECPICRKAIERRILLY

SEQ ID NO: 16702 - protein, 17 aa, Artificial Sequence
  Synthetic polypeptide
MGTVAHACNPSTLGGPV

SEQ ID NO: 16703 - protein, 10 aa, Artificial Sequence
  Synthetic polypeptide
SQHFGRPSLI

SEQ ID NO: 16704 - protein, 11 aa, Artificial Sequence
  Synthetic polypeptide
AEITPLYSSLV

SEQ ID NO: 16705 - protein, 37 aa, Artificial Sequence
  Synthetic polypeptide
FQLFGRLRHENHLNHEGRGAELSMSRDHAIVLQPSLI

SEQ ID NO: 16706 - protein, 2 aa, Artificial Sequence
  Synthetic polypeptide
GF

SEQ ID NO: 16707 - protein, 463 aa, Artificial Sequence
  Synthetic polypeptide
RARWLTPVIPALWEAEDSEGDTPLHDAISKKRDDILAVLLEAGADVTITNNNGFNALHHAALRGNPSAMRVLLSKLPRPWIVDEKKDDGYTALHLAALNNHVEVAELLVHQGNANLDIQNVNQQTALHLAVERQHTQIVRLLVRAGAKLDIQDKDGDTPLHEALRHHTLSQLRQLQDMQDVGKVDAAWEPSKNTLIMGLGTQGAEKKSAASIACFLAANGADLSIRNKKGQSPLDLCPDPNLCKALAKCHKEKVSGQVGSRSPSMISNDSETLEECMVCSDMKRDTLFGPCGHIATCSLCSPRVKKCLICKEQVQSRTKIEECVVCSDKKAAVLFQPCGHMCACENCANLMKKCVQCRAVVERRVPFIMCCGGKSSEDATDDISSGNIPVLQKDKDNTNVNADVQKLQQQLQDIKEQTMCPVCLDRLKNMIFLCGHGTCQLCGDRMSECPICRKAIERRILLY

SEQ ID NO: 16708 - protein, 19 aa, Artificial Sequence
  Synthetic polypeptide
SQHCGRLRILKVIPLFMMQ

SEQ ID NO: 16709 - protein, 25 aa, Artificial Sequence
  Synthetic polypeptide
GWRPLTNRALKRLTMTPQLHHMTPC

SEQ ID NO: 16710 - protein, 4 aa, Artificial Sequence
  Synthetic polypeptide
QTGP

SEQ ID NO: 16711 - protein, 76 aa, Artificial Sequence; identical to SEQ ID NO: 4062
  Synthetic polypeptide

SEQ ID NO: 16712 - protein, 747 aa, Artificial Sequence
  Synthetic polypeptide
ITPSRCGWGSPNQLKALRERRVSFSSSRSLEEEEANCHGTVAATSTPAWVFSLLAYPADFGLASLHNHATPENFDVDGGMDQDIFDINEGLGLDLFEGDIRLDRAQIRNSIIGEKYRWPHTIPYVLEDSLEMNAKGVILNAFERYRLKTCIDFKPWAGETNYISVFKGSGCWSSVGNRRVGKQELSIGANCDRIATVQHEFLHALGFWHEQSRSDRDDYVRIMWDRILSGREHNFNTYSDDISDSLNVPYDYTSVMHYSKTAFQNGTEPTIVTRISDFEDVIGQRMDFSDSDLLKLNQLYNCSSSLSFMDSCSFELENVCGMIQSSGDNADWQRVSQVPRGPESDHSNMGQCQGSGFFMHFDSSSVNVGATAVLESRTLYPKRGFQCLQFYLYNSGSESDQLNIYIREYSADNVDGNLTLVEEIKEIPTGSWQLYHVTLKVTKKFRVVFEGRKGSGASLGGLSIDDINLSETRCPHHIWHIRNFTQFIGSPNGTLYSPPFYSSKGYAFQIYLNLAHVTNAGIYFHLISGANDDQLQWPCPWQQATMTLLDQNPDIRQRMSNQRSITTDPFMTTDNGNYFWDRPSKVGTVALFSNGTQFRRGGGYGTSAFITHERLKSRDFIKGDDVYILLTVEDISHLNSTQIQLTPAPSVQDLCSKTTCKNDGVCTVRDGKAECRCQSGEDWWYMGERCEKRGSTRDTIVIAVSSTVAVFALMLIITLVSVYCTRKKYRERMSSNRPNLTPQNHAF

SEQ ID NO: 16713 - protein, 748 aa, Artificial Sequence
  Synthetic polypeptide
ITPSRCGWGSPNQLKALRERRVSFSSSRSLEEEEANCHGTVAATSTPAWVFSLLAYPADFGLASLHNHATPENFDVDGGMDQDIFDINEGLGLDLFEGDIRLDRAQIRNSIIGEKYRWPHTIPYVLEDSLEMNAKGVILNAFERYRLKTCIDFKPWAGETNYISVFKGSGCWSSVGNRRVGKQELSIGANCDRIATVQHEFLHALGFWHEQSRSDRDDYVRIMWDRILSGREHNFNTYSDDISDSLNVPYDYTSVMHYSKTAFQNGTEPTIVTRISDFEDVIGQRMDFSDSDLLKLNQLYNCSSSLSFMDSCSFELENVCGMIQSSGDNADWQRVSQVPRGPESDHSNMGQCQGSGFFMHFDSSSVNVGATAVLESRTLYPKRGFQCLQFYLYNSGSESDQLNIYIREYSADNVDGNLTLVEEIKEIPTGSWQLYHVTLKVTKKFRVVFEGRKGSGASLGGLSIDDINLSETRCPHHIWHIRNFTQFIGSPNGTLYSPPFYSSKGYAFQIYLNLAHVTNAGIYFHLISGANDDQLQWPCPWQQATMTLLDQNPDIRQRMSNQRSITTDPFMTTDNGNYFWDRPSKVGTVALFSNGTQFRRGGGYGTSAFITHERLKSRDFIKGDDVYILLTVEDISHLNSTQIQLTPAPSVQDLCSKTTCKNDGVCTVRDGKAECRCQSGEDWWYMGERCEKRGSTRDTIVIAVSSTVAVFALMLIITLVSVYCTRKKYRERMSSNRPNLTPQNQHAF

SEQ ID NO: 16714 - protein, 34 aa, Artificial Sequence
  Synthetic polypeptide
LQHQLLPGSLACWPTLQILDLPASTIMQLQKTLM

SEQ ID NO: 16715 - protein, 22 aa, Artificial Sequence
  Synthetic polypeptide
PAGLPCRFWTCQPPQSCNSRKL

SEQ ID NO: 16716 - protein, 212 aa, Artificial Sequence
  Synthetic polypeptide
SAGCDCEDGGFGGGDDGEYDGKVMIAHAHPQEVYNEYVPRGCKNKCHSHFHDTLGQSDDLIHHHHDYHHILHHHHHQNHHPHSHSQRYSREELKDAGVATLAWMVIMGDGLHNFSDGLAIGAAFTEGLSSGLSTSVAVFCHELPHELGDFAVLLKAGMTVKQAVLYNALSAMLAYLGMATGIFIGHYAENVSMWIFALTAGLFMYVALVDMV

SEQ ID NO: 16717 - protein, 261 aa, Artificial Sequence
  Synthetic polypeptide
SAGCDCEDGGFGGGDDGEYDGKVMIAHAHPQEVYNEYVPRGCKNKCHSHFHDTLGQSDDLIHHHHDYHHILHHHHHQNHHPHSHSQRYSREELKDAGVATLAWMVIMGDGLHNFSDGLAIGAAFTEGLSSGLSTSVAVFCHELPHELGDFAVLLKAGMTVKQAVLYNALSAMLAYLGMATGIFIGHYAENVSMWIFALTAGLFMYVALVDMVPEMLHNDASDHGCSRWGYFFLQNAGMLLGFGIMLLISIFEHKIVFRINF

SEQ ID NO: 16718 - protein, 214 aa, Artificial Sequence
  Synthetic polypeptide
SAGCDCEDGGFGGGDDGEYDGKVMIAHAHPQEVYNEYVPRGCKNKCHSHFHDTLGQSDDLIHHHHDYHHILHHHHHQNHHPHSHSQRYSREELKDAGVATLAWMVIMGDGLHNFSDGLAIGAAFTEGLSSGLSTSVAVFCHELPHELGDFAVLLKAGMTVKQAVLYNALSAMLAYLGMATGIFIGHYAENVSMWIFALTAGLFMYVALVDMVSF

SEQ ID NO: 16719 - protein, 24 aa, Artificial Sequence
  Synthetic polypeptide
VALAVTVRMVVLVVVMMENMMVRS

SEQ ID NO: 16720 - protein, 429 aa, Artificial Sequence
  Synthetic polypeptide
GVIKLSSAVEAQSSTESAQDAYMDGQGQRGDIISQSGLSNSTESLDSMKALTAAIEAANAQIHGPASQHMGNNTATVTTTTTIATVTTEDRKKDHFKKNRCLSIGIQVDDAEEPDKTGENKAPSKFQSVGVQVEEEKCFRRFTRSNSVTTAVQADLDFHDNLENSLESIEDNSCPGPMARQFSRDASTSTVSIQGSGNHYHACAADDDFDTDFDPSILPPPDPWIDSITEDPLEAVQRSVCHRDGHWFLKLLQAERDRMEGWCQQMEREERENNLPEDILGKIRTAVGSAQLLMAQKFYQFRELCEENLNPNAHPRPTSQDLAGFWDMLQLSIENISMKFDELHQLKANNWKQMDPLDKKERRAPPPVPKKPAKGPAPLIRERSLESSQRQEARKRLMAAKRAASVRQNSATESAESIEIYIPEAQTRL

SEQ ID NO: 16721 - protein, 457 aa, Artificial Sequence
  Synthetic polypeptide
GVIKLSSAVEVSSCITTYKKTPPPVPPRTTTKPFISITAQSSTESAQDAYMDGQGQRGDIISQSGLSNSTESLDSMKALTAAIEAANAQIHGPASQHMGNNTATVTTTTTIATVTTEDRKKDHFKKNRCLSIGIQVDDAEEPDKTGENKAPSKFQSVGVQVEEEKCFRRFTRSNSVTTAVQADLDFHDNLENSLESIEDNSCPGPMARQFSRDASTSTVSIQGSGNHYHACAADDDFDTDFDPSILPPPDPWIDSITEDPLEAVQRSVCHRDGHWFLKLLQAERDRMEGWCQQMEREERENNLPEDILGKIRTAVGSAQLLMAQKFYQFRELCEENLNPNAHPRPTSQDLAGFWDMLQLSIENISMKFDELHQLKANNWKQMDPLDKKERRAPPPVPKKPAKGPAPLIRERSLESSQRQEARKRLMAAKRAASVRQNSATESAESIEIYIPEAQTRL

SEQ ID NO: 16722 - protein, 29 aa, Artificial Sequence
  Synthetic polypeptide
NPVSTKNTKLSWVWSGVPVVPATRDAEVS

SEQ ID NO: 16723 - protein, 16 aa, Artificial Sequence
  Synthetic polypeptide
SQLLGTLRCHKTEFCS

SEQ ID NO: 16724 - protein, 640 aa, Artificial Sequence
  Synthetic polypeptide
NYFGLLASTTVPQDEWTGYTPRGKDDEIPCRRMRSGSYIKAMGDEDSGDSDTSPKPSPKVAARRESYLKATQPSLTELTTLKISNEHSPKLQIRSHSYLRAVSEVSINRSLDSLDPAGLLTSPKFRSRNESYMRAMSTISQVSEMEVNGQFESVCESVFSELESQAVEALDLPMPGCFRMRSHSYVRAIEKGCSQDDECVSLRSSSPPRTTTTVRTIQSSTAQSSTESAQDAYMDGQGQRGDIISQSGLSNSTESLDSMKALTAAIEAANAQIHGPASQHMGNNTATVTTTTTIATVTTEDRKKDHFKKNRCLSIGIQVDDAEEPDKTGENKAPSKFQSVGVQVEEEKCFRRFTRSNSVTTAVQADLDFHDNLENSLESIEDNSCPGPMARQFSRDASTSTVSIQGSGNHYHACAADDDFDTDFDPSILPPPDPWIDSITEDPLEAVQRSVCHRDGHWFLKLLQAERDRMEGWCQQMEREERENNLPEDILGKIRTAVGSAQLLMAQKFYQFRELCEENLNPNAHPRPTSQDLAGFWDMLQLSIENISMKFDELHQLKANNWKQMDPLDKKERRAPPPVPKKPAKGPAPLIRERSLESSQRQEARKRLMAAKRAASVRQNSATESAESIEIYIPEAQTRL

SEQ ID NO: 16725 - protein, 650 aa, Artificial Sequence
  Synthetic polypeptide
NYFGLLASTTVPQDEWTGYTPRGKDDEIPCRRMRSGSYIKAMGDEDSGDSDTSPKPSPKVAARRESYLKATQPSLTELTTLKISNEHSPKLQIRSHSYLRAVSEVSINRSLDSLDPAGLLTSPKFRSRNESYMRAMSTISQVSEMEVNGQFESVCESVFSELESQAVEALDLPMPGCFRMRSHSYVRAIEKGCSQDDECVSLRSSSPPRTTTTVRTIQSSTGVIKLSSAVEAQSSTESAQDAYMDGQGQRGDIISQSGLSNSTESLDSMKALTAAIEAANAQIHGPASQHMGNNTATVTTTTTIATVTTEDRKKDHFKKNRCLSIGIQVDDAEEPDKTGENKAPSKFQSVGVQVEEEKCFRRFTRSNSVTTAVQADLDFHDNLENSLESIEDNSCPGPMARQFSRDASTSTVSIQGSGNHYHACAADDDFDTDFDPSILPPPDPWIDSITEDPLEAVQRSVCHRDGHWFLKLLQAERDRMEGWCQQMEREERENNLPEDILGKIRTAVGSAQLLMAQKFYQFRELCEENLNPNAHPRPTSQDLAGFWDMLQLSIENISMKFDELHQLKANNWKQMDPLDKKERRAPPPVPKKPAKGPAPLIRERSLESSQRQEARKRLMAAKRAASVRQNSATESAESIEIYIPEAQTRL

SEQ ID NO: 16726 - protein, 678 aa, Artificial Sequence
  Synthetic polypeptide
NYFGLLASTTVPQDEWTGYTPRGKDDEIPCRRMRSGSYIKAMGDEDSGDSDTSPKPSPKVAARRESYLKATQPSLTELTTLKISNEHSPKLQIRSHSYLRAVSEVSINRSLDSLDPAGLLTSPKFRSRNESYMRAMSTISQVSEMEVNGQFESVCESVFSELESQAVEALDLPMPGCFRMRSHSYVRAIEKGCSQDDECVSLRSSSPPRTTTTVRTIQSSTGVIKLSSAVEVSSCITTYKKTPPPVPPRTTTKPFISITAQSSTESAQDAYMDGQGQRGDIISQSGLSNSTESLDSMKALTAAIEAANAQIHGPASQHMGNNTATVTTTTTIATVTTEDRKKDHFKKNRCLSIGIQVDDAEEPDKTGENKAPSKFQSVGVQVEEEKCFRRFTRSNSVTTAVQADLDFHDNLENSLESIEDNSCPGPMARQFSRDASTSTVSIQGSGNHYHACAADDDFDTDFDPSILPPPDPWIDSITEDPLEAVQRSVCHRDGHWFLKLLQAERDRMEGWCQQMEREERENNLPEDILGKIRTAVGSAQLLMAQKFYQFRELCEENLNPNAHPRPTSQDLAGFWDMLQLSIENISMKFDELHQLKANNWKQMDPLDKKERRAPPPVPKKPAKGPAPLIRERSLESSQRQEARKRLMAAKRAASVRQNSATESAESIEIYIPEAQTRL

SEQ ID NO: 16727 - protein, 668 aa, Artificial Sequence
  Synthetic polypeptide
NYFGLLASTTVPQDEWTGYTPRGKDDEIPCRRMRSGSYIKAMGDEDSGDSDTSPKPSPKVAARRESYLKATQPSLTELTTLKISNEHSPKLQIRSHSYLRAVSEVSINRSLDSLDPAGLLTSPKFRSRNESYMRAMSTISQVSEMEVNGQFESVCESVFSELESQAVEALDLPMPGCFRMRSHSYVRAIEKGCSQDDECVSLRSSSPPRTTTTVRTIQSSTVSSCITTYKKTPPPVPPRTTTKPFISITAQSSTESAQDAYMDGQGQRGDIISQSGLSNSTESLDSMKALTAAIEAANAQIHGPASQHMGNNTATVTTTTTIATVTTEDRKKDHFKKNRCLSIGIQVDDAEEPDKTGENKAPSKFQSVGVQVEEEKCFRRFTRSNSVTTAVQADLDFHDNLENSLESIEDNSCPGPMARQFSRDASTSTVSIQGSGNHYHACAADDDFDTDFDPSILPPPDPWIDSITEDPLEAVQRSVCHRDGHWFLKLLQAERDRMEGWCQQMEREERENNLPEDILGKIRTAVGSAQLLMAQKFYQFRELCEENLNPNAHPRPTSQDLAGFWDMLQLSIENISMKFDELHQLKANNWKQMDPLDKKERRAPPPVPKKPAKGPAPLIRERSLESSQRQEARKRLMAAKRAASVRQNSATESAESIEIYIPEAQTRL

SEQ ID NO: 16728 - protein, 620 aa, Artificial Sequence
  Synthetic polypeptide
NYFGLLASTTVPQDEWTGYTPRGKDDEIPCRRMRSGSYIKAMGDEDSGDSDTSPKPSPKVAARRESYLKATQPSLTELTTLKISNEHSPKLQIRSHSYLRAVSEVSINRSLDSLDPAGLLTSPKFRSRNESYMRAMSTISQVSEMEVNGQFESVCESVFSELESQAVEALDLPMPGCFRMRSHSYVRAIEKGCSQDDECVSLRSSSPPRTTTTVRTIQSSTVSSCITTYKKTPPPVPPRTTTKPFISITAQSSTESAQDAYMDGQGQRGDIISQSGLSNSTESLDSMKALTAAIEAANAQIHGPASQHMGNNTATVTTTTTIATVTTEDRKKDHFKKNRCLSIGIQVDDAEEPDKTGENKAPSKFQSVGVQVEEEKCFRRFTRSNSVTTAVQADLDFHDNLENSLESIEDNSCPGPMARQFSRDASTSTVSIQGSGNHYHACAADDDFDTDFDPSILPPPDPWIDSITEDPLEAVQRSVCHRDGHWFLKLLQAERDRMEGWCQQMEREERENNLPEDILGKIRTAVGSAQLLMAQKFYQFRELCEENLNPNAHPRPTSQDLAGFWDMLQLSIENISMKFDELHQLKANNWKQMDPLDKKVEQCRFCMVHLKTCTNTGQSK

SEQ ID NO: 16729 - protein, 57 aa, Artificial Sequence
  Synthetic polypeptide
RCFALGCEDGERDHGTRGKGREMDSPLEPPEDAQLCYLGFSSVKLFWTSGLHNCSTR

SEQ ID NO: 16730 - protein, 134 aa, Artificial Sequence
  Synthetic polypeptide
RWRKGPWDKGKRQGNGFSPRASRGRPALLSWFQLSETILDFWPPQLFHKMNGQGTPHEVKMMKFHAEECGVAVISRPWGMKTVETQTRVLSLLQKLLRGEKAISRLLSHPLQNSPHSKSPMNTHPNSRSGVIVT

SEQ ID NO: 16731 - protein, 18 aa, Artificial Sequence
  Synthetic polypeptide
CLDLGLSSLQNCFYRRRL

SEQ ID NO: 16732 - protein, 24 aa, Artificial Sequence
  Synthetic polypeptide
CLDLGLSSLQNCFYRRRLESCPRI

SEQ ID NO: 16733 - protein, 54 aa, Artificial Sequence
  Synthetic polypeptide
KRFKGAVHPFCLLRTQQEGGIWEAEKKPTSNTESTDALILDFPASRTVSTEEGL

SEQ ID NO: 16734 - protein, 122 aa, Artificial Sequence
  Synthetic polypeptide
KRFKGAVHPFCLLRTQQEGGIWEAEKKPTSNTESTDALILDFPASRTVSTEEGLSLAQEYNCGFFETSAALRFCIDDAFHGLVREIRKKESMPSLMEKKLKRKDSLWKKLKGSLKKKRENMT

SEQ ID NO: 16735 - protein, 15 aa, Artificial Sequence
  Synthetic polypeptide
SWTFQPPELFLQKKA

SEQ ID NO: 16736 - protein, 1529 aa, Artificial Sequence
  Synthetic polypeptide
AAQFVVICSPRKQVQVQETVRETISCSQMPAFSEPAGEESPFTGTTTISFSNLGGVHKENASLAQHSEVKPCTCGPQHEEKQDRDGNIPDNFREDLKYEQSISEANDETMSPGVFSRHLPKDARADFREPVAVSVASPEPTDTALTLENVCDEPRDREAVCAMECFEAGDQGTCFDTIDSLVGRPVDKYSPQEICSVDTELAEGQNKVSDLCSSNDKTLEVFFQTQVSETSVSTCKSSKDGNSVMSPLFTSTFTLNISHTASEGATGENLAKVENSTYPLASTVHAGQEQPSPSNSGGLDETQLLSSENNPLVQFKEGGDKSPSPSAADTTATPASYSSIVSFPWEKPTTLTANNECFQATRETEDTSTVTIATEVHPAKYLAVSIPEDKHAGGTEERFPRASHEKVSQFPSQVQLDHILSGATIKSTKELLCRAPSVPGVPHHVLQLPEGEGFCSNSPLQVDNLSGDKSQTVDRADFRSYEENFQERGSETKQGVQQQSLSQQGSLSAPDFQQSLPTTSAAQEERNLVPTAHSPASSREGAGQRSGWGTRVSVVAETAGEEDSQALSNVPSLSDILLEESKEYRPGNWEAGNKLKIITLEASASEIWPPRQLTNSESKASDGGLIIPDKVWAVPDSLKADAVVPELAPSEIAALAHSPEDAESALADSRESHKGEEPTISVHWRSLSSRGFSQPRLLESSVDPVDEKELSVTDSLSAASETGGKENVNNVSQDQEEKQLKMDHTAFFKKFLTCPKILESSVDPIDEISVIEYTRAGKPEPSETTPQGAREGGQSNDGNMGHEAEIQPAILQVPCLQGTILSENRISRSQEGSMKQEAEQIQPEEAKTAIWQVLQPSEGGERIPSGCSIGQIQESSDGSLGEAEQSKKDKAELISPTSPLSSCLPIMTHASLGVDTHNSTGQIHDVPENDIVEPRKRQYVFPVSQKRGTIENERGKPLPSSPDLTRFPCTSSPEGNVTDFLISHKMEEPKIEVLQIGETKPPSSSSSSAKTLAFISGERELEKAPKLLQDPCQKGTLGCAKKSREREKSLEARAGKSPGTLTAVTGSEEVKRKPEAPGSGHLAEGVKKKILSRVAALRLKLEEKENIRKNSAFLKKMPKLETSLSHTEEKQDPKKPSCKREGRAPVLLKKIQAEMFPEHSGNVKLSCQFAEIHEDSTICWTKDSKSIAQVQRSAGDNSTVSFAIVQASPKDQGLYYCCIKNSYGKVTAEFNLTAEVLKQLSSRQDTKGCEEIEFSQLIFKEDFLHDSYFGGRLRGQIATEELHFGEGVHRKAFRSTVMHGLMPVFKPGHACVLKVHNAIAYGTRNNDELIQRNYKLAAQECYVQNTARYYAKIYAAEAQPLEGFGEVPEIIPIFLIHRPENNIPYATVEEELIGEFVKYSIRDGKEINFLRRESEAGQKCCTFQHWVYQKTSGCLLVTDMQGVGMKLTDVGIATLAKGYKGFKGNCSMTFIDQFKALHQCNKYCKMLGLKSLQNNNQKQKQPSIGKSKVQTNSMTIKKAGPETPGEKKT

SEQ ID NO: 16737 - protein, 67 aa, Artificial Sequence
  Synthetic polypeptide
ETGTSSGNSQRDNLLQPDASFLRACWGGVPIHWDHNNFLLKLRRGPQGKCIISSTLGGQTLYLWSTA

SEQ ID NO: 16738 - protein, 118 aa, Artificial Sequence
  Synthetic polypeptide
REDGHMKTEGETGVMHLQVREWQGWPGATRSWKRQGRTSRGVQPWRHLECTLLASRTEGVKLWCFKLPSLWSFAALGNRYKFRKQSERQSLAARCQLSQSLLGRSPHSLGPQQFPSQT

SEQ ID NO: 16739 - protein, 41 aa, Artificial Sequence
  Synthetic polypeptide
NHNEISPHNVRTSVVKNMKHTPLIEAVTLEDFSMLTLQQVP

SEQ ID NO: 16740 - protein, 4 aa, Artificial Sequence
  Synthetic polypeptide
NILH

SEQ ID NO: 16741 - protein, 386 aa, Artificial Sequence
  Synthetic polypeptide
NVCCQKHETYSIDRSSDPGRFFYVDITTGALMTARPLDREEFSWHNITVLAMEMNNPSQVGSVPVTIKVLDVNDNAPEFPRFYEAFVCENAKAGQLIQTVSAVDQDDPRNGQHFYYSLAPEAANNPNFTIRDNQDNTARILTRRSGFRQQEQSVFHLPILIADSGQPVLSSTGTLTIQVCSCDDDGHVMSCSPEAYMLPVSLSRGALIAILACIFVLLVLVLLILSMRRHRKQPYIIDDEENIHENIVRYDDEGGGEEDTEAFDIAAMWNPREAQAGAAPKTRQDMLPEIESLSRYVPQTCAVNSTVHSYVLAKLYEADMDLWAPPFDSLQTYMFEGDGSVAGSLSSLQSATSDSEQSFDFLTDWGPRFRKLAELYGASEGPAPLW

SEQ ID NO: 16742 - protein, 635 aa, Artificial Sequence
  Synthetic polypeptide
DLMVLKMGVSLHKLSLCLLPSRKDVTCSSLPFTMIVRPPQPHGTVALQIAPPCTSEKHYEHLGRCCNKCEPGKYMSSKCTTTSDSVCLPCGPDEYLDSWNEEDKCLLHKVCDTGKALVAVVAGNSTTPRRCACTAGYHWSQDCECCRRNTECAPGLGAQHPLQLNKDTVCKPCLAGYFSDAFSSTDKCRPWTNCTFLGKRVEHHGTEKSDAVCSSSLPARKPPNEPHVYLPGLIILLLFASVALVAAIIFGVCYRKKGKALTANLWHWINEACGRLSGDKESSGDSCVSTHTANFGQQGACEGVLLLTLEEKTFPEDMCYPDQGGVCQGTCVGGGPYAQGEDARMLSLVSKTEIEEDSFRQMPTEDEYMDRPSQPTDQLLFLTEPGSKSTPPFSEPLEVGENDSLSQCFTGTQSTVGSESCNCTEPLCRTDWTPMSSENYLQKEVDSGHCPHWAASPSPNWADVCTGCRNPPGEDCEPLVGSPKRGPLPQCAYGMGLPPEEEASRTEARDQPEDGADGRLPSSARAGAGSGSSPGGQSPASGNVTGNSNSTFISSGQVMNFKGDIIVVYVSQTSQEGAAAAAEPMGRPVQEETLARRDSFAGNGPRFPDPCGGPEGLREPEKASRPVQEQGGAKA

SEQ ID NO: 16743 - protein, 318 aa, Artificial Sequence
  Synthetic polypeptide
DLMVLKMGVSLHKLSLCLLPSRKDVTCSSLPFTMIVRPPQPHGTVALQIAPPCTSEKHYEHLGRCCNKCEPGKYMSSKCTTTSDSVCLPCGPDEYLDSWNEEDKCLLHKVCDTGKALVAVVAGNSTTPRRCACTAGYHWSQDCECCRRNTECAPGLGAQHPLQLNKDTVCKPCLAGYFSDAFSSTDKCRPWTNCTFLGKRVEHHGTEKSDAVCSSSLPARKPPNGNVTGNSNSTFISSGQVMNFKGDIIVVYVSQTSQEGAAAAAEPMGRPVQEETLARRDSFAGNGPRFPDPCGGPEGLREPEKASRPVQEQGGAKA

SEQ ID NO: 16744 - protein, 164 aa, Artificial Sequence
  Synthetic polypeptide
DLPSHMELWLCRSLLHVPVRSIMSIWDGAVTNVNQESTCLLNALLPLTVYVCPVARMNTWIAGMKKINACCIKFVIQARPWWPWSPATARPPGAARARLGTTGARTASAAAATPSARRAWAPSTRCSSTRTQCANLALQATSLMPFPPRTNADPGPTVPSLERE

SEQ ID NO: 16745 - protein, 59 aa, Artificial Sequence
  Synthetic polypeptide
VSLMRSDGFKNGSFLAQALSLPAAIQERCDLLLLAFHHDCETSPATWNCGFADRSSMYQ

SEQ ID NO: 16746 - protein, 137 aa, Artificial Sequence
  Synthetic polypeptide
AETRRQSIDYPTSARNLSVEQLKMYTVLSLKDCRSTKRIDFGVQINFIEQARPWWPWSPATARPPGAARARLGTTGARTASAAAATPSARRAWAPSTRCSSTRTQCANLALQATSLMPFPPRTNADPGPTVPSLERE

SEQ ID NO: 16747 - protein, 523 aa, Artificial Sequence
  Synthetic polypeptide
AGKALVAVVAGNSTTPRRCACTAGYHWSQDCECCRRNTECAPGLGAQHPLQLNKDTVCKPCLAGYFSDAFSSTDKCRPWTNCTFLGKRVEHHGTEKSDAVCSSSLPARKPPNEPHVYLPGLIILLLFASVALVAAIIFGVCYRKKGKALTANLWHWINEACGRLSGDKESSGDSCVSTHTANFGQQGACEGVLLLTLEEKTFPEDMCYPDQGGVCQGTCVGGGPYAQGEDARMLSLVSKTEIEEDSFRQMPTEDEYMDRPSQPTDQLLFLTEPGSKSTPPFSEPLEVGENDSLSQCFTGTQSTVGSESCNCTEPLCRTDWTPMSSENYLQKEVDSGHCPHWAASPSPNWADVCTGCRNPPGEDCEPLVGSPKRGPLPQCAYGMGLPPEEEASRTEARDQPEDGADGRLPSSARAGAGSGSSPGGQSPASGNVTGNSNSTFISSGQVMNFKGDIIVVYVSQTSQEGAAAAAEPMGRPVQEETLARRDSFAGNGPRFPDPCGGPEGLREPEKASRPVQEQGGAKA

SEQ ID NO: 16748 - protein, 206 aa, Artificial Sequence
  Synthetic polypeptide
AGKALVAVVAGNSTTPRRCACTAGYHWSQDCECCRRNTECAPGLGAQHPLQLNKDTVCKPCLAGYFSDAFSSTDKCRPWTNCTFLGKRVEHHGTEKSDAVCSSSLPARKPPNGNVTGNSNSTFISSGQVMNFKGDIIVVYVSQTSQEGAAAAAEPMGRPVQEETLARRDSFAGNGPRFPDPCGGPEGLREPEKASRPVQEQGGAKA

SEQ ID NO: 16749 - protein, 70 aa, Artificial Sequence
  Synthetic polypeptide
ILLSRQGPGGRGRRQQHDPPALRVHGWVPLEPGLRVLPPQHRVRAGPGRPAPVAAQQGHSVQTLPCRLLL

SEQ ID NO: 16750 - protein, 35 aa, Artificial Sequence
  Synthetic polypeptide
LFTTLGSLWNTQTLLLPPAEWPCFLKSMGAPSSEM

SEQ ID NO: 16751 - protein, 14 aa, Artificial Sequence
  Synthetic polypeptide
SPWVLPVLKCDWKQ

SEQ ID NO: 16752 - protein, 1035 aa, Artificial Sequence
  Synthetic polypeptide
GLAHSNQFTKLKSLNLSNNHLGDFPLAVCSIPTLAELNVSCNALRSVPAAVGVMHNLQTFLLDGNFLQSLPAELENMKQLSYLGLSFNEFTDIPEVLEKLTAVDKLCMSGNCVETLRLQALRKMPHIKHVDLRLNVIRKLIADEVDFLQHVTQLDLRDNKLGDLDAMIFNNIEVLHCERNQLVTLDICGYFLKALYASSNELVQLDVYPVPNYLSYMDVSRNRLENVPEWVCESRKLEVLDIGHNQICELPARLFCNSSLRKLLAGHNQLARLPERLERTSVEVLDVQHNQLLELPPNLLMKADSLRFLNASANKLESLPPATLSEETNSILQELYLTNNSLTDKCVPLLTGHPHLKILHMAYNRLQSFPASKMAKLEELEEIDLSGNKLKAIPTTIMNCRRMHTVIAHSNCIEVFPEVMQLPEIKCVDLSCNELSEVTLPENLPPKLQELDLTGNPRLVLDHKTLELLNNIRCFKIDQPSTGDASGAPAVWSHGYTEASGVKNKLCVAALSVNNFCDNREALYGVFDGDRNVEVPYLLQCTMSDILAEELQKTKNEEEYMVNTFIVMQRKLGTAGQKLGGAAVLCHIKHDPVDPGGSFTLTSANVGKCQTVLCRNGKPLPLSRSYIMSCEEELKRIKQHKAIITEDGKVNGVTESTRILGYTFLHPSVVPRPHVQSVLLTPQDEFFILGSKGLWDSLSVEEAVEAVRNVPDALAAAKKLCTLAQSYGCHDSISAVVVQLSVTEDSFCCCELSAGGAVPPPSPGIFPPSVNMVIKDRPSDGLGVPSSSSGMASEISSELSTSEMSSEVGSTASDEPPPGALSENSPAYPSEQRCMLHPICLSNSFQRQLSSATFSSAFSDNGLDSDDEEPIEGVFTNGSRVEVEVDIHCSRAKEKEKQQHLLQVPAEASDEGIVISANEDEPGLPRKADFSAVGTIGRRRANGSVAPQERSHNVIEVATDAPLRKPGGYFAAPAQPDPDDQFIIPPELEEEVKEIMKHHQEQQQQQQPPPPPQLQPQLPRHYQLDQLPDYYDTPL

SEQ ID NO: 16753 - protein, 28 aa, Artificial Sequence
  Synthetic polypeptide
GRSCALFVIVSIGLTQPKVWHIVTSSPS

SEQ ID NO: 16754 - protein, 8 aa, Artificial Sequence
  Synthetic polypeptide
PVHQVEES

SEQ ID NO: 16755 - protein, 6 aa, Artificial Sequence
  Synthetic polypeptide
FLIMEH

SEQ ID NO: 16756 - protein, 24 aa, Artificial Sequence
  Synthetic polypeptide
LQETKLRAPTDSSLWNISYPGDSK

SEQ ID NO: 16757 - protein, 310 aa, Artificial Sequence
  Synthetic polypeptide
SVTVSHHCQVGLSSCRKPSSGLPLIPHYGTLVIQVTASDADDPSSGNNARLLYSLLQGQPYFSVEPTTGVIRISSKMDRELQDEYWVIIQAKDMIGQPGALSGTTSVLIKLSDVNDNKPIFKESLYRLTVSESAPTGTSIGTIMAYDNDIGENAEMDYSIEEDDSQTFDIITNHETQEGIVILKKKVDFEHQNHYGIRAKVKNHHVPEQLMKYHTEASTTFIKIQVEDVDEPPLFLLPYYVFEVFEETPQGSFVGVVSATDPDNRKSPIRYSITRSKVFNINDNGTITTSNSLDREISAWYNLSITATEK

SEQ ID NO: 16758 - protein, 355 aa, Artificial Sequence
  Synthetic polypeptide
SVTVSHHCQVGLSSCRKPSSGLPLIPHYGTLVIQVTASDADDPSSGNNARLLYSLLQGQPYFSVEPTTGVIRISSKMDRELQDEYWVIIQAKDMIGQPGALSGTTSVLIKLSDVNDNKPIFKESLYRLTVSESAPTGTSIGTIMAYDNDIGENAEMDYSIEEDDSQTFDIITNHETQEGIVILKKKVDFEHQNHYGIRAKVKNHHVPEQLMKYHTEASTTFIKIQVEDVDEPPLFLLPYYVFEVFEETPQGSFVGVVSATDPDNRKSPIRYSITRSKVFNINDNGTITTSNSLDREISAWYNLSITATEKYNIEQISSIPLYVQVLNINDHAPEFSQYYETYVCENAGSGQGLFF

SEQ ID NO: 16759 - protein, 637 aa, Artificial Sequence
  Synthetic polypeptide
SVTVSHHCQVGLSSCRKPSSGLPLIPHYGTLVIQVTASDADDPSSGNNARLLYSLLQGQPYFSVEPTTGVIRISSKMDRELQDEYWVIIQAKDMIGQPGALSGTTSVLIKLSDVNDNKPIFKESLYRLTVSESAPTGTSIGTIMAYDNDIGENAEMDYSIEEDDSQTFDIITNHETQEGIVILKKKVDFEHQNHYGIRAKVKNHHVPEQLMKYHTEASTTFIKIQVEDVDEPPLFLLPYYVFEVFEETPQGSFVGVVSATDPDNRKSPIRYSITRSKVFNINDNGTITTSNSLDREISAWYNLSITATEKYNIEQISSIPLYVQVLNINDHAPEFSQYYETYVCENAGSGQVIQTISAVDRDESIEEHHFYFNLSVEDTNNSSFTIIDNQDNTAVILTNRTGFNLQEEPVFYISILIADNGIPSLTSTNTLTIHVCDCGDSGSTQTCQYQELVLSMGFKTEVIIAILICIMIIFGFIFLTLGLKQRRKQILFPEKSEDFRENIFQYDDEGGGEEDTEAFDIAELRSSTIMRERKTRKTTSAEIRSLYRQSLQVGPDSAIFRKFILEKLEEANTDPCAPPFDSLQTYAFEGTGSLAGSLSSLESAVSDQDESYDYLNELGPRFKRLACMFGSAVQSNN

SEQ ID NO: 16760 - protein, 406 aa, Artificial Sequence
  Synthetic polypeptide
SVTVSHHCQVGLSSCRKPSSGLPLIPHYGTLVIQVTASDADDPSSGNNARLLYSLLQGQPYFSVEPTTGVIRISSKMDRELQDEYWVIIQAKDMIGQPGALSGTTSVLIKLSDVNDNKPIFKESLYRLTVSESAPTGTSIGTIMAYDNDIGENAEMDYSIEEDDSQTFDIITNHETQEGIVILKKKVDFEHQNHYGIRAKVKNHHVPEQLMKYHTEASTTFIKIQVEDVDEPPLFLLPYYVFEVFEETPQGSFVGVVSATDPDNRKSPIRYSITRSKVFNINDNGTITTSNSLDREISAWYNLSITATEKYNIEQISSIPLYVQVLNINDHAPEFSQYYETYVCENAGSGQVIQTISAVDRDESIEEHHFYFNLSVEDTNNSSFTIIDNQELVLTFKKNLSSTSPS

SEQ ID NO: 16761 - protein, 11 aa, Artificial Sequence
  Synthetic polypeptide
GFPRHVVLFEA

SEQ ID NO: 16762 - protein, 155 aa, Artificial Sequence
  Synthetic polypeptide
GFPRHVVLFEAAVPSNSHIVSEPGKNVTLTCQPQMTWPVQAVRWEKIQPRQIDLLTYCNLVHGRNFTSKFPRQIVSNCSHGRWSVIVIPDVTVSDSGLYRCYLQASAGENETFVMRLTVAEGKTDNQYTLFVAGGTVLLLLFVISITTIIVIFLN

SEQ ID NO: 16763 - protein, 215 aa, Artificial Sequence
  Synthetic polypeptide
GFPRHVVLFEAAVPSNSHIVSEPGKNVTLTCQPQMTWPVQAVRWEKIQPRQIDLLTYCNLVHGRNFTSKFPRQIVSNCSHGRWSVIVIPDVTVSDSGLYRCYLQASAGENETFVMRLTVAEGKTDNQYTLFVAGGTVLLLLFVISITTIIVIFLNRRRRRERRDLFTESWDTQKAPNNYRSPISTSQPTNQSMDDTREDIYVNYPTFSRRPKTRV

SEQ ID NO: 16764 - protein, 20 aa, Artificial Sequence
  Synthetic polypeptide
LLLAFHLDCEASPDMWCFLR

SEQ ID NO: 16765 - protein, 44 aa, Artificial Sequence
  Synthetic polypeptide
LLLAFHLDCEASPDMWCFLRQLCHQIATLFRNLERMSHSLVSLR

SEQ ID NO: 16766 - protein, 42 aa, Artificial Sequence
  Synthetic polypeptide
WFKKEEFPCTSSLCLPAAIHVRRDFSLPSTLIVRLPQTCGAF

SEQ ID NO: 16767 - protein, 8 aa, Artificial Sequence
  Synthetic polypeptide
GFPRHVVL

SEQ ID NO: 16768 - protein, 22 aa, Artificial Sequence
  Synthetic polypeptide
LLLAFHLDCEASPDMWCYSFEA

SEQ ID NO: 16769 - protein, 166 aa, Artificial Sequence
  Synthetic polypeptide
LLLAFHLDCEASPDMWCYSFEAAVPSNSHIVSEPGKNVTLTCQPQMTWPVQAVRWEKIQPRQIDLLTYCNLVHGRNFTSKFPRQIVSNCSHGRWSVIVIPDVTVSDSGLYRCYLQASAGENETFVMRLTVAEGKTDNQYTLFVAGGTVLLLLFVISITTIIVIFLN

SEQ ID NO: 16770 - protein, 226 aa, Artificial Sequence
  Synthetic polypeptide
LLLAFHLDCEASPDMWCYSFEAAVPSNSHIVSEPGKNVTLTCQPQMTWPVQAVRWEKIQPRQIDLLTYCNLVHGRNFTSKFPRQIVSNCSHGRWSVIVIPDVTVSDSGLYRCYLQASAGENETFVMRLTVAEGKTDNQYTLFVAGGTVLLLLFVISITTIIVIFLNRRRRRERRDLFTESWDTQKAPNNYRSPISTSQPTNQSMDDTREDIYVNYPTFSRRPKTRV

SEQ ID NO: 16771 - protein, 45 aa, Artificial Sequence
  Synthetic polypeptide
WFKKEEFPCTSSLCLPAAIHVRRDFSLPSTLIVRLPQTCGAIVLR

SEQ ID NO: 16772 - protein, 69 aa, Artificial Sequence
  Synthetic polypeptide
WFKKEEFPCTSSLCLPAAIHVRRDFSLPSTLIVRLPQTCGAIVLRQLCHQIATLFRNLERMSHSLVSLR

SEQ ID NO: 16773 - protein, 22 aa, Artificial Sequence
  Synthetic polypeptide
DSDWLSLLLKLADGLLWDLVII

SEQ ID NO: 16774 - protein, 64 aa, Artificial Sequence
  Synthetic polypeptide
SKWKNVKKRDRPSIPAYIFLPCWMLPALEHRTPSYSVLRLRLALLAPQACGWPIVGPCDHIVLR

SEQ ID NO: 16775 - protein, 88 aa, Artificial Sequence
  Synthetic polypeptide
SKWKNVKKRDRPSIPAYIFLPCWMLPALEHRTPSYSVLRLRLALLAPQACGWPIVGPCDHIVLRQLCHQIATLFRNLERMSHSLVSLR

SEQ ID NO: 16776 - protein, 6 aa, Artificial Sequence
  Synthetic polypeptide
SYSFEA

SEQ ID NO: 16777 - protein, 150 aa, Artificial Sequence
  Synthetic polypeptide
SYSFEAAVPSNSHIVSEPGKNVTLTCQPQMTWPVQAVRWEKIQPRQIDLLTYCNLVHGRNFTSKFPRQIVSNCSHGRWSVIVIPDVTVSDSGLYRCYLQASAGENETFVMRLTVAEGKTDNQYTLFVAGGTVLLLLFVISITTIIVIFLN

SEQ ID NO: 16778 - protein, 210 aa, Artificial Sequence
  Synthetic polypeptide
SYSFEAAVPSNSHIVSEPGKNVTLTCQPQMTWPVQAVRWEKIQPRQIDLLTYCNLVHGRNFTSKFPRQIVSNCSHGRWSVIVIPDVTVSDSGLYRCYLQASAGENETFVMRLTVAEGKTDNQYTLFVAGGTVLLLLFVISITTIIVIFLNRRRRRERRDLFTESWDTQKAPNNYRSPISTSQPTNQSMDDTREDIYVNYPTFSRRPKTRV

SEQ ID NO: 16779 - protein, 10 aa, Artificial Sequence
  Synthetic polypeptide
GLPSHVELSL

SEQ ID NO: 16780 - protein, 258 aa, Artificial Sequence
  Synthetic polypeptide
RHCKFPEVSLVMWNSPCEGNTFFCHSNMCINNTLVCNGLQNCVYPWDENHCKEKRKTSLLDQLTNTSGTVIGVTSCIVIILIIISVIVQIKQPRKKYVQRKSDFDQTVFQEVFEPPHYELCTLRGTGATADFADVADDFENYHKLRRSSSKCIHDHHCGSQLSSTKGSRSNLSTRDASILTEMPTQPGKPLIPPMNRRNILVMKHSYSQDAADACDIDEIEEVPTTSHRLSRHDKAVQRFCLIGSLSKHESEYNTTRV

SEQ ID NO: 16781 - protein, 52 aa, Artificial Sequence
  Synthetic polypeptide
SCGTLLVKATHSSAIVTCVLIILWSAMDSRTVCILGMKITVKRRGKPACWTS

SEQ ID NO: 16782 - protein, 19 aa, Artificial Sequence
  Synthetic polypeptide
KTRLVDSDTLTKYPRYGEP

SEQ ID NO: 16783 - protein, 21 aa, Artificial Sequence
  Synthetic polypeptide
MGIIEDKISGFRHINKVSKVW

SEQ ID NO: 16784 - protein, 73 aa, Artificial Sequence
  Synthetic polypeptide
QSIQGMVNREVLEQVERGYRMPCPQGCPESLHELMNLCWKKDPDERPTFEYIQSFLEDYFTATEPQYQPGENL

SEQ ID NO: 16785 - protein, 31 aa, Artificial Sequence
  Synthetic polypeptide
EVPFTSHHDSEASPAMWNFWGGIPKVLSGPS

SEQ ID NO: 16786 - protein, 43 aa, Artificial Sequence
  Synthetic polypeptide
GLPSHVELLGRNSEGSLWTVISLGSLKISTSWLCTPTISPTVM

SEQ ID NO: 16787 - protein, 129 aa, Artificial Sequence
  Synthetic polypeptide
ISLMRSDGFIRGFHFHIFLIFFLLPPCKKCLSPPTMILRPPQPCGTFGAEFRRFSLDRHKPGKFEDFYKLVVHTHHISNSDVTIGYADVHGDLLPINNDDNFCKAVSSANPLLRVFIQKRDDGALRPGT

SEQ ID NO: 16788 - protein, 398 aa, Artificial Sequence
  Synthetic polypeptide
ISLMRSDGFIRGFHFHIFLIFFLLPPCKKCLSPPTMILRPPQPCGTFGAEFRRFSLDRHKPGKFEDFYKLVVHTHHISNSDVTIGYADVHGDLLPINNDDNFCKAVSSANPLLRVFIQKREEAERGSLGAGSLCRRRRALGALRDEGPRRRAHLDIGLPRDFRPVSSIIDVDLVPETHRRVRLHRHGCEKPLGFYIRDGASVRVTPHGLEKVPGIFISRMVPGGLAESTGLLAVNDEVLEVNGIEVAGKTLDQVTDMMIANSHNLIVTVKPANQRNNVVRGGRALGSSGPPSDGTAGFVGPPAPRVLQNFHPDEAESDEDNDVVIEGTLEPARPPQTPGAPAGSLSRVNGAGLAQRLQRDLALDGGLQRLLSSLRADPRHSLALPPGGVEEHGPAVTL

SEQ ID NO: 16789 - protein, 6 aa, Artificial Sequence
  Synthetic polypeptide
LQQMMS

SEQ ID NO: 16790 - protein, 1557 aa, Artificial Sequence
  Synthetic polypeptide
STNDELDELRAEMEEMRDSYLEEDVYQLQELRRELDRANKNCRILQYRLRKAEQKSLKVAETGQVDGELIRSLEQDLKVAKDVSVRLHHELKTVEEKRAKAEDENETLRQQMIEVEISKQALQNELERLKESSLKRRSTREMYKEKKTFNQDDSADLRCQLQFAKEEAFLMRKKMAKLGREKDELEQELQKYKSLYGDVDSPLPTGEAGGPPSTREAELKLRLKLVEEEANILGRKIVELEVENRGLKAEMEDMRGQQEREGPGRDHAPSIPTSPFGDSLESSTELRRHLQFVEEEAELLRRSISEIEDHNRQLTHELSKFKFEPPREPGWLGEGASPGAGGGAPLQEELKSARLQISELSGKVLKLQHENHALLSNIQRCDLAAHLGLRAPSPRDSDAESDAGKKESDGEESRLPQPKREGPVGGESDSEEMFEKTSGFGSGKPSEASEPCPTELLKAREDSEYLVTLKHEAQRLERTVERLITDTDSFLHDAGLRGGAPLPGPGLQGEEEQGEGDQQEPQLLGTINAKMKAFKKELQAFLEQVNRIGDGLSPLPHLTESSSFLSTVTSVSRDSPIGNLGKELGPDLQSRLKEQLEWQLGPARGDERESLRLRAARELHRRADGDTGSHGLGGQTCFSLEMEEEHLYALRWKELEMHSLALQNTLHERTWSDEKNLMQQELRSLKQNIFLFYVKLRWLLKHWRQGKQMEEEGEEFTEGEHPETLSRLGELGVQGGHQADGPDHDSDRGCGFPVGEHSPHSRVQIGDHSLRLQTADRGQPHKQVVENQQLFSAFKALLEDFRAELREDERARLRLQQQYASDKAAWDVEWAVLKCRLEQLEEKTENKLGELGSSAESKGALKKEREVHQKLLADSHSLVMDLRWQIHHSEKNWNREKVELLDRLDRDRQEWERQKKEFLWRIEQLQKENSPRRGGSFLCDQKDGNVRPFPHQGSLRMPRPVAMWPCADADSIPFEDRPLSKLKESDRCSASENLYLDALSLDDEPEEPPAHRPEREFRNRLPEEEENHKGNLQRAVSVSSMSEFQRLMDISPFLPEKGLPSTSSKEDVTPPLSPDDLKYIEEFNKSWDYTPNRGHNGGGPDLWADRTEVGRAGHEDSTEPFPDSSWYLTTSVTMTTDTMTSPEHCQKQPLRSHVLTEQSGLRVLHSPPAVRRVDSITAAGGEGPFPTSRARGSPGDTKGGPPEPMLSRWPCTSPRHSRDYVEGARRPLDSPLCTSLGFASPLHSLEMSKNLSDDMKEVAFSVRNAICSGPGELQVKDMACQTNGSRTMGTQTVQTISVGLQTEALRGSGVTSSPHKCLTPKAGGGATPVSSPSRSLRSRQVAPAIEKVQAKFERTCCSPKYGSPKLQRKPLPKADQPNNRTSPGMAQKGYSESAWARSTTTRESPVHTTINDGLSSLFNIIDHSPVVQDPFQKGLRAGSRSRSAEPRPELGPGQETGTNSRGRSPSPIGVGSEMCREEGGEGTPVKQDLSAPPGYTLTENVARILNKKLLEHALKEERRQAAHGPPGLHSDSHSLGDTAEPGPMENQTVLLTAPWGL

SEQ ID NO: 16791 - protein, 1575 aa, Artificial Sequence
  Synthetic polypeptide
KQTGLGLQCGFNLLDVKLWTQDELDELRAEMEEMRDSYLEEDVYQLQELRRELDRANKNCRILQYRLRKAEQKSLKVAETGQVDGELIRSLEQDLKVAKDVSVRLHHELKTVEEKRAKAEDENETLRQQMIEVEISKQALQNELERLKESSLKRRSTREMYKEKKTFNQDDSADLRCQLQFAKEEAFLMRKKMAKLGREKDELEQELQKYKSLYGDVDSPLPTGEAGGPPSTREAELKLRLKLVEEEANILGRKIVELEVENRGLKAEMEDMRGQQEREGPGRDHAPSIPTSPFGDSLESSTELRRHLQFVEEEAELLRRSISEIEDHNRQLTHELSKFKFEPPREPGWLGEGASPGAGGGAPLQEELKSARLQISELSGKVLKLQHENHALLSNIQRCDLAAHLGLRAPSPRDSDAESDAGKKESDGEESRLPQPKREGPVGGESDSEEMFEKTSGFGSGKPSEASEPCPTELLKAREDSEYLVTLKHEAQRLERTVERLITDTDSFLHDAGLRGGAPLPGPGLQGEEEQGEGDQQEPQLLGTINAKMKAFKKELQAFLEQVNRIGDGLSPLPHLTESSSFLSTVTSVSRDSPIGNLGKELGPDLQSRLKEQLEWQLGPARGDERESLRLRAARELHRRADGDTGSHGLGGQTCFSLEMEEEHLYALRWKELEMHSLALQNTLHERTWSDEKNLMQQELRSLKQNIFLFYVKLRWLLKHWRQGKQMEEEGEEFTEGEHPETLSRLGELGVQGGHQADGPDHDSDRGCGFPVGEHSPHSRVQIGDHSLRLQTADRGQPHKQVVENQQLFSAFKALLEDFRAELREDERARLRLQQQYASDKAAWDVEWAVLKCRLEQLEEKTENKLGELGSSAESKGALKKEREVHQKLLADSHSLVMDLRWQIHHSEKNWNREKVELLDRLDRDRQEWERQKKEFLWRIEQLQKENSPRRGGSFLCDQKDGNVRPFPHQGSLRMPRPVAMWPCADADSIPFEDRPLSKLKESDRCSASENLYLDALSLDDEPEEPPAHRPEREFRNRLPEEEENHKGNLQRAVSVSSMSEFQRLMDISPFLPEKGLPSTSSKEDVTPPLSPDDLKYIEEFNKSWDYTPNRGHNGGGPDLWADRTEVGRAGHEDSTEPFPDSSWYLTTSVTMTTDTMTSPEHCQKQPLRSHVLTEQSGLRVLHSPPAVRRVDSITAAGGEGPFPTSRARGSPGDTKGGPPEPMLSRWPCTSPRHSRDYVEGARRPLDSPLCTSLGFASPLHSLEMSKNLSDDMKEVAFSVRNAICSGPGELQVKDMACQTNGSRTMGTQTVQTISVGLQTEALRGSGVTSSPHKCLTPKAGGGATPVSSPSRSLRSRQVAPAIEKVQAKFERTCCSPKYGSPKLQRKPLPKADQPNNRTSPGMAQKGYSESAWARSTTTRESPVHTTINDGLSSLFNIIDHSPVVQDPFQKGLRAGSRSRSAEPRPELGPGQETGTNSRGRSPSPIGVGSEMCREEGGEGTPVKQDLSAPPGYTLTENVARILNKKLLEHALKEERRQAAHGPPGLHSDSHSLGDTAEPGPMENQTVLLTAPWGL

SEQ ID NO: 16792 - protein, 23 aa, Artificial Sequence
  Synthetic polypeptide
LKADRPGFAVWLQFTRCEALDTG

SEQ ID NO: 16793 - protein, 7 aa, Artificial Sequence
  Synthetic polypeptide
SFGHRMS

SEQ ID NO: 16794 - protein, 19 aa, Artificial Sequence
  Synthetic polypeptide
IASASLGRCPCPPCLSSSV

SEQ ID NO: 16795 - protein, 20 aa, Artificial Sequence
  Synthetic polypeptide
KLPGFESLLPPWGGVRVLHV

SEQ ID NO: 16796 - protein, 600 aa, Artificial Sequence
  Synthetic polypeptide
NCLGLNRFCLLGAVSVSSMSEFQRLMDISPFLPEKGLPSTSSKEDVTPPLSPDDLKYIEEFNKSWDYTPNRGHNGGGPDLWADRTEVGRAGHEDSTEPFPDSSWYLTTSVTMTTDTMTSPEHCQKQPLRSHVLTEQSGLRVLHSPPAVRRVDSITAAGGEGPFPTSRARGSPGDTKGGPPEPMLSRWPCTSPRHSRDYVEGARRPLDSPLCTSLGFASPLHSLEMSKNLSDDMKEVAFSVRNAICSGPGELQVKDMACQTNGSRTMGTQTVQTISVGLQTEALRGSGVTSSPHKCLTPKAGGGATPVSSPSRSLRSRQVAPAIEKVQAKFERTCCSPKYGSPKLQRKPLPKADQPNNRTSPGMAQKGYSESAWARSTTTRESPVHTTINDGLSSLFNIIDHSPVVQDPFQKGLRAGSRSRSAEPRPELGPGQETGTNSRGRSPSPIGVGSEMCREEGGEGTPVKQDLSAPPGYTLTENVARILNKKLLEHALKEERRQAAHGPPGLHSDSHSLGDTAEPGPMEELPCSALAPSLEPCFSRPERPANRRPPSRWAPHSPTASQPQSPGDPTSLEEHGGEEPPEEQPHRDASLHGLSQYNSL

SEQ ID NO: 16797 - protein, 535 aa, Artificial Sequence
  Synthetic polypeptide
NCLGLNRFCLLGAVSVSSMSEFQRLMDISPFLPEKGLPSTSSKEDVTPPLSPDDLKYIEEFNKSWDYTPNRGHNGGGPDLWADRTEVGRAGHEDSTEPFPDSSWYLTTSVTMTTDTMTSPEHCQKQPLRSHVLTEQSGLRVLHSPPAVRRVDSITAAGGEGPFPTSRARGSPGDTKGGPPEPMLSRWPCTSPRHSRDYVEGARRPLDSPLCTSLGFASPLHSLEMSKNLSDDMKEVAFSVRNAICSGPGELQVKDMACQTNGSRTMGTQTVQTISVGLQTEALRGSGVTSSPHKCLTPKAGGGATPVSSPSRSLRSRQVAPAIEKVQAKFERTCCSPKYGSPKLQRKPLPKADQPNNRTSPGMAQKGYSESAWARSTTTRESPVHTTINDGLSSLFNIIDHSPVVQDPFQKGLRAGSRSRSAEPRPELGPGQETGTNSRGRSPSPIGVGSEMCREEGGEGTPVKQDLSAPPGYTLTENVARILNKKLLEHALKEERRQAAHGPPGLHSDSHSLGDTAEPGPMENQTVLLTAPWGL

SEQ ID NO: 16798 - protein, 19 aa, Artificial Sequence
  Synthetic polypeptide
IQQNVHRRMPLHRCSHYKS

SEQ ID NO: 16799 - protein, 6 aa, Artificial Sequence
  Synthetic polypeptide
NAPSQM

SEQ ID NO: 16800 - protein, 290 aa, Artificial Sequence
  Synthetic polypeptide
VDVWTGQIDMLQSKYSKMFIVECPFTDVVTTNLKLRNPSDRKVCFKVKTTAPRRYCVRPNSGIIDPGSTVTVSVMLQPFDYDPNEKSKHKFMVQTIFAPPNTSDMEAVWKEAKPDELMDSKLRCVFEMPNENDKLGITPPGNAPTVTSMSSINNTVATPASYHTKDDPRGLSVLKQEKQKNDMEPSKAVPLNASKQDGPMPKPHSVSLNDTETRKLMEECKRLQGEMMKLSEENRHLRDEGLRLRKVAHSDKPGSTSTASFRDNVTSPLPSLLVVIAAIFIGFFLGKFIL

SEQ ID NO: 16801 - protein, 245 aa, Artificial Sequence
  Synthetic polypeptide
VDVWTGQIDMLQSKYSKMFIVECPFTDVVTTNLKLRNPSDRKVCFKVKTTAPRRYCVRPNSGIIDPGSTVTVSVMLQPFDYDPNEKSKHKFMVQTIFAPPNTSDMEAVWKEAKPDELMDSKLRCVFEMPNENDKLNDMEPSKAVPLNASKQDGPMPKPHSVSLNDTETRKLMEECKRLQGEMMKLSEENRHLRDEGLRLRKVAHSDKPGSTSTASFRDNVTSPLPSLLVVIAAIFIGFFLGKFIL

SEQ ID NO: 16802 - protein, 10 aa, Artificial Sequence
  Synthetic polypeptide
AGGKRQNLMN

SEQ ID NO: 16803 - protein, 13 aa, Artificial Sequence
  Synthetic polypeptide
HHNKNELVERGKT

SEQ ID NO: 16804 - protein, 190 aa, Artificial Sequence
  Synthetic polypeptide
TTTTKMSWWKEAKPDELMDSKLRCVFEMPNENDKLGITPPGNAPTVTSMSSINNTVATPASYHTKDDPRGLSVLKQEKQKNDMEPSKAVPLNASKQDGPMPKPHSVSLNDTETRKLMEECKRLQGEMMKLSEENRHLRDEGLRLRKVAHSDKPGSTSTASFRDNVTSPLPSLLVVIAAIFIGFFLGKFIL

SEQ ID NO: 16805 - protein, 145 aa, Artificial Sequence
  Synthetic polypeptide
TTTTKMSWWKEAKPDELMDSKLRCVFEMPNENDKLNDMEPSKAVPLNASKQDGPMPKPHSVSLNDTETRKLMEECKRLQGEMMKLSEENRHLRDEGLRLRKVAHSDKPGSTSTASFRDNVTSPLPSLLVVIAAIFIGFFLGKFIL

SEQ ID NO: 16806 - protein, 11 aa, Artificial Sequence
  Synthetic polypeptide
HREAPSFSSPG

SEQ ID NO: 16807 - protein, 70 aa, Artificial Sequence
  Synthetic polypeptide
LEDLSHFDTEKHPHFPVQDEGLRLRKVAHSDKPGSTSTASFRDNVTSPLPSLLVVIAAIFIGFFLGKFIL

SEQ ID NO: 16808 - protein, 17 aa, Artificial Sequence
  Synthetic polypeptide
VILTQRSTLIFQSRMKV

SEQ ID NO: 16809 - protein, 35 aa, Artificial Sequence
  Synthetic polypeptide
AERSRSCLLSQNFGRPKWENLLRTGFGTLAQPRTP

SEQ ID NO: 16810 - protein, 282 aa, Artificial Sequence
  Synthetic polypeptide
GQVLGPWPSRGPPDRPALRVGRLRVPARPGGACSRPRAQRRQPPGRPLPAADALSVLCGRRVPACAEPVAAALPDAGLDLLRDTDSEGRGAGEGDAAAGHHARHGAQPRGALARLVPQLPRALPAQRRTAGSGAQAGRHPPLQPPGRGLPVLGSLRGGHGDPELPAQRLLLPRQPGCGLRRPGLLLPLPALRAVCGLAGPAARGWPRGREPAVARGLRLRLREPGSAGGAGRGRAVAQRGHPAYGRRLQPGPGLWPSAAGRGALRPRHLVPGSCVPRPVRDP

SEQ ID NO: 16811 - protein, 1684 aa, Artificial Sequence
  Synthetic polypeptide
ILPVISELWEAKVGESLEDRFWDPGPAADPLTDLRYVWGGFVYLQDLVERAAVRVLSGANPRAGLYLQQMPYPCYVDDVFLRVLSRSLPLFLTLAWIYSVTLTVKAVVREKETRLRDTMRAMGLSRAVLWLGWFLSCLGPFLLSAALLVLVLKLGDILPYSHPGVVFLFLAAFAVATVTQSFLLSAFFSRANLAAACGGLAYFSLYLPYVLCVAWRDRLPAGGRVAASLLSPVAFGFGCESLALLEEQGEGAQWHNVGTRPTADVFSLAQVSGLLLLDAALYGLATWYLEAVCPGQYGIPEPWNFPFRRSYWCGPRPPKSPAPCPTPLDPKVLVEEAPPGLSPGVSVRSLEKRFPGSPQPALRGLSLDFYQGHITAFLGHNGAGKTTTLSILSGLFPPSGGSAFILGHDVRSSMAAIRPHLGVCPQYNVLFDMLTVDEHVWFYGRLKGLSAAVVGPEQDRLLQDVGLVSKQSVQTRHLSGGMQRKLSVAIAFVGGSQVVILDEPTAGVDPASRRGIWELLLKYREGRTLILSTHHLDEAELLGDRVAVVAGGRLCCCGSPLFLRRHLGSGYYLTLVKARLPLTTNEKADTDMEGSVDTRQEKKNGSQGSRVGTPQLLALVQHWVPGARLVEELPHELVLVLPYTGAHDGSFATLFRELDTRLAELRLTGYGISDTSLEEIFLKVVEECAADTDMEDGSCGQHLCTGIAGLDVTLRLKMPPQETALENGEPAGSAPETDQGSGPDAVGRVQGWALTRQQLQALLLKRFLLARRSRRGLFAQIVLPALFVGLALVFSLIVPPFGHYPALRLSPTMYGAQVSFFSEDAPGDPGRARLLEALLQEAGLEEPPVQHSSHRFSAPEVPAEVAKVLASGNWTPESPSPACQCSRPGARRLLPDCPAAAGGPPPPQAVTGSGEVVQNLTGRNLSDFLVKTYPRLVRQGLKTKKWVNEVRYGGFSLGGRDPGLPSGQELGRSVEELWALLSPLPGGALDRVLKNLTAWAHSLDAQDSLKIWFNNKGWHSMVAFVNRASNAILRAHLPPGPARHAHSITTLNHPLNLTKEQLSEGALMASSVDVLVSICVVFAMSFVPASFTLVLIEERVTRAKHLQLMGGLSPTLYWLGNFLWDMCNYLVPACIVVLIFLAFQQRAYVAPANLPALLLLLLLYGWSITPLMYPASFFFSVPSTAYVVLTCINLFIGINGSMATFVLELFSDQKLQEVSRILKQVFLIFPHFCLGRGLIDMVRNQAMADAFERLGDRQFQSPLRWEVVGKNLLAMVIQGPLFLLFTLLLQHRSQLLPQPRVRSLPLLGEEDEDVARERERVVQGATQGDVLVLRNLTKVYRGQRMPAVDRLCLGIPPGECFGLLGVNGAGKTSTFRMVTGDTLASRGEAVLAGHSVAREPSAAHLSMGYCPQSDAIFELLTGREHLELLARLRGVPEAQVAQTAGSGLARLGLSWYADRPAGTYSGGNKRKLATALALVGDPAVVFLDEPTTGMDPSARRFLWNSLLAVVREGRSVMLTSHSMEECEALCSRLAIMVNGRFRCLGSPQHLKGRFAAGHTLTLRVPAARSQPAAAFVAAEFPGAELREAHGGRLRFQLPPGGRCALARVFGELAVHGAEHGVEDFSVSQTMLEEVFLYFSKDQGKDEDTEEQKEAGVGVDPAPGLQHPKRVSQFLDDPSTAETVL

SEQ ID NO: 16812 - protein, 46 aa, Artificial Sequence
  Synthetic polypeptide
IPEAEVAASTGSLNHGIFLFGGATGADLGPPRVQPLAPPRWTQRCW

SEQ ID NO: 16813 - protein, 34 aa, Artificial Sequence
  Synthetic polypeptide
LGVVAGACFLATWKAEAGEMLESRRRRLRPVRDP

SEQ ID NO: 16814 - protein, 1408 aa, Artificial Sequence
  Synthetic polypeptide
LLGRQRQEKCLNPGGGGCGQYGIPEPWNFPFRRSYWCGPRPPKSPAPCPTPLDPKVLVEEAPPGLSPGVSVRSLEKRFPGSPQPALRGLSLDFYQGHITAFLGHNGAGKTTTLSILSGLFPPSGGSAFILGHDVRSSMAAIRPHLGVCPQYNVLFDMLTVDEHVWFYGRLKGLSAAVVGPEQDRLLQDVGLVSKQSVQTRHLSGGMQRKLSVAIAFVGGSQVVILDEPTAGVDPASRRGIWELLLKYREGRTLILSTHHLDEAELLGDRVAVVAGGRLCCCGSPLFLRRHLGSGYYLTLVKARLPLTTNEKADTDMEGSVDTRQEKKNGSQGSRVGTPQLLALVQHWVPGARLVEELPHELVLVLPYTGAHDGSFATLFRELDTRLAELRLTGYGISDTSLEEIFLKVVEECAADTDMEDGSCGQHLCTGIAGLDVTLRLKMPPQETALENGEPAGSAPETDQGSGPDAVGRVQGWALTRQQLQALLLKRFLLARRSRRGLFAQIVLPALFVGLALVFSLIVPPFGHYPALRLSPTMYGAQVSFFSEDAPGDPGRARLLEALLQEAGLEEPPVQHSSHRFSAPEVPAEVAKVLASGNWTPESPSPACQCSRPGARRLLPDCPAAAGGPPPPQAVTGSGEVVQNLTGRNLSDFLVKTYPRLVRQGLKTKKWVNEVRYGGFSLGGRDPGLPSGQELGRSVEELWALLSPLPGGALDRVLKNLTAWAHSLDAQDSLKIWFNNKGWHSMVAFVNRASNAILRAHLPPGPARHAHSITTLNHPLNLTKEQLSEGALMASSVDVLVSICVVFAMSFVPASFTLVLIEERVTRAKHLQLMGGLSPTLYWLGNFLWDMCNYLVPACIVVLIFLAFQQRAYVAPANLPALLLLLLLYGWSITPLMYPASFFFSVPSTAYVVLTCINLFIGINGSMATFVLELFSDQKLQEVSRILKQVFLIFPHFCLGRGLIDMVRNQAMADAFERLGDRQFQSPLRWEVVGKNLLAMVIQGPLFLLFTLLLQHRSQLLPQPRVRSLPLLGEEDEDVARERERVVQGATQGDVLVLRNLTKVYRGQRMPAVDRLCLGIPPGECFGLLGVNGAGKTSTFRMVTGDTLASRGEAVLAGHSVAREPSAAHLSMGYCPQSDAIFELLTGREHLELLARLRGVPEAQVAQTAGSGLARLGLSWYADRPAGTYSGGNKRKLATALALVGDPAVVFLDEPTTGMDPSARRFLWNSLLAVVREGRSVMLTSHSMEECEALCSRLAIMVNGRFRCLGSPQHLKGRFAAGHTLTLRVPAARSQPAAAFVAAEFPGAELREAHGGRLRFQLPPGGRCALARVFGELAVHGAEHGVEDFSVSQTMLEEVFLYFSKDQGKDEDTEEQKEAGVGVDPAPGLQHPKRVSQFLDDPSTAETVL

SEQ ID NO: 16815 - protein, 48 aa, Artificial Sequence
  Synthetic polypeptide
PHHSLPVHLEWPLPTQWWLCLHPGPRRPLQHGRHPAPPGRLSSVQRAV

SEQ ID NO: 16816 - protein, 9 aa, Artificial Sequence
  Synthetic polypeptide
PPPLPPRPS

SEQ ID NO: 16817 - protein, 1302 aa, Artificial Sequence
  Synthetic polypeptide
PPTTPSPSILSGLFPPSGGSAFILGHDVRSSMAAIRPHLGVCPQYNVLFDMLTVDEHVWFYGRLKGLSAAVVGPEQDRLLQDVGLVSKQSVQTRHLSGGMQRKLSVAIAFVGGSQVVILDEPTAGVDPASRRGIWELLLKYREGRTLILSTHHLDEAELLGDRVAVVAGGRLCCCGSPLFLRRHLGSGYYLTLVKARLPLTTNEKADTDMEGSVDTRQEKKNGSQGSRVGTPQLLALVQHWVPGARLVEELPHELVLVLPYTGAHDGSFATLFRELDTRLAELRLTGYGISDTSLEEIFLKVVEECAADTDMEDGSCGQHLCTGIAGLDVTLRLKMPPQETALENGEPAGSAPETDQGSGPDAVGRVQGWALTRQQLQALLLKRFLLARRSRRGLFAQIVLPALFVGLALVFSLIVPPFGHYPALRLSPTMYGAQVSFFSEDAPGDPGRARLLEALLQEAGLEEPPVQHSSHRFSAPEVPAEVAKVLASGNWTPESPSPACQCSRPGARRLLPDCPAAAGGPPPPQAVTGSGEVVQNLTGRNLSDFLVKTYPRLVRQGLKTKKWVNEVRYGGFSLGGRDPGLPSGQELGRSVEELWALLSPLPGGALDRVLKNLTAWAHSLDAQDSLKIWFNNKGWHSMVAFVNRASNAILRAHLPPGPARHAHSITTLNHPLNLTKEQLSEGALMASSVDVLVSICVVFAMSFVPASFTLVLIEERVTRAKHLQLMGGLSPTLYWLGNFLWDMCNYLVPACIVVLIFLAFQQRAYVAPANLPALLLLLLLYGWSITPLMYPASFFFSVPSTAYVVLTCINLFIGINGSMATFVLELFSDQKLQEVSRILKQVFLIFPHFCLGRGLIDMVRNQAMADAFERLGDRQFQSPLRWEVVGKNLLAMVIQGPLFLLFTLLLQHRSQLLPQPRVRSLPLLGEEDEDVARERERVVQGATQGDVLVLRNLTKVYRGQRMPAVDRLCLGIPPGECFGLLGVNGAGKTSTFRMVTGDTLASRGEAVLAGHSVAREPSAAHLSMGYCPQSDAIFELLTGREHLELLARLRGVPEAQVAQTAGSGLARLGLSWYADRPAGTYSGGNKRKLATALALVGDPAVVFLDEPTTGMDPSARRFLWNSLLAVVREGRSVMLTSHSMEECEALCSRLAIMVNGRFRCLGSPQHLKGRFAAGHTLTLRVPAARSQPAAAFVAAEFPGAELREAHGGRLRFQLPPGGRCALARVFGELAVHGAEHGVEDFSVSQTMLEEVFLYFSKDQGKDEDTEEQKEAGVGVDPAPGLQHPKRVSQFLDDPSTAETVL

SEQ ID NO: 16818 - protein, 17 aa, Artificial Sequence
  Synthetic polypeptide
PHHSLPVNPPPLPPRPS

SEQ ID NO: 16819 - protein, 1310 aa, Artificial Sequence
  Synthetic polypeptide
PPPLPPREPPTTPSPSILSGLFPPSGGSAFILGHDVRSSMAAIRPHLGVCPQYNVLFDMLTVDEHVWFYGRLKGLSAAVVGPEQDRLLQDVGLVSKQSVQTRHLSGGMQRKLSVAIAFVGGSQVVILDEPTAGVDPASRRGIWELLLKYREGRTLILSTHHLDEAELLGDRVAVVAGGRLCCCGSPLFLRRHLGSGYYLTLVKARLPLTTNEKADTDMEGSVDTRQEKKNGSQGSRVGTPQLLALVQHWVPGARLVEELPHELVLVLPYTGAHDGSFATLFRELDTRLAELRLTGYGISDTSLEEIFLKVVEECAADTDMEDGSCGQHLCTGIAGLDVTLRLKMPPQETALENGEPAGSAPETDQGSGPDAVGRVQGWALTRQQLQALLLKRFLLARRSRRGLFAQIVLPALFVGLALVFSLIVPPFGHYPALRLSPTMYGAQVSFFSEDAPGDPGRARLLEALLQEAGLEEPPVQHSSHRFSAPEVPAEVAKVLASGNWTPESPSPACQCSRPGARRLLPDCPAAAGGPPPPQAVTGSGEVVQNLTGRNLSDFLVKTYPRLVRQGLKTKKWVNEVRYGGFSLGGRDPGLPSGQELGRSVEELWALLSPLPGGALDRVLKNLTAWAHSLDAQDSLKIWFNNKGWHSMVAFVNRASNAILRAHLPPGPARHAHSITTLNHPLNLTKEQLSEGALMASSVDVLVSICVVFAMSFVPASFTLVLIEERVTRAKHLQLMGGLSPTLYWLGNFLWDMCNYLVPACIVVLIFLAFQQRAYVAPANLPALLLLLLLYGWSITPLMYPASFFFSVPSTAYVVLTCINLFIGINGSMATFVLELFSDQKLQEVSRILKQVFLIFPHFCLGRGLIDMVRNQAMADAFERLGDRQFQSPLRWEVVGKNLLAMVIQGPLFLLFTLLLQHRSQLLPQPRVRSLPLLGEEDEDVARERERVVQGATQGDVLVLRNLTKVYRGQRMPAVDRLCLGIPPGECFGLLGVNGAGKTSTFRMVTGDTLASRGEAVLAGHSVAREPSAAHLSMGYCPQSDAIFELLTGREHLELLARLRGVPEAQVAQTAGSGLARLGLSWYADRPAGTYSGGNKRKLATALALVGDPAVVFLDEPTTGMDPSARRFLWNSLLAVVREGRSVMLTSHSMEECEALCSRLAIMVNGRFRCLGSPQHLKGRFAAGHTLTLRVPAARSQPAAAFVAAEFPGAELREAHGGRLRFQLPPGGRCALARVFGELAVHGAEHGVEDFSVSQTMLEEVFLYFSKDQGKDEDTEEQKEAGVGVDPAPGLQHPKRVSQFLDDPSTAETVL

SEQ ID NO: 16820 - protein, 49 aa, Artificial Sequence
  Synthetic polypeptide
TPHHSLPVHLEWPLPTQWWLCLHPGPRRPLQHGRHPAPPGRLSSVQRAV

SEQ ID NO: 16821 - protein, 10 aa, Artificial Sequence
  Synthetic polypeptide
APPPLPPRPS

SEQ ID NO: 16822 - protein, 65 aa, Artificial Sequence
  Synthetic polypeptide
PHHSLPVNPPPLPPREPPHHSLPVHLEWPLPTQWWLCLHPGPRRPLQHGRHPAPPGRLSSVQRAV

SEQ ID NO: 16823 - protein, 1311 aa, Artificial Sequence
  Synthetic polypeptide
TPHHSLPVSPPTTPSPSILSGLFPPSGGSAFILGHDVRSSMAAIRPHLGVCPQYNVLFDMLTVDEHVWFYGRLKGLSAAVVGPEQDRLLQDVGLVSKQSVQTRHLSGGMQRKLSVAIAFVGGSQVVILDEPTAGVDPASRRGIWELLLKYREGRTLILSTHHLDEAELLGDRVAVVAGGRLCCCGSPLFLRRHLGSGYYLTLVKARLPLTTNEKADTDMEGSVDTRQEKKNGSQGSRVGTPQLLALVQHWVPGARLVEELPHELVLVLPYTGAHDGSFATLFRELDTRLAELRLTGYGISDTSLEEIFLKVVEECAADTDMEDGSCGQHLCTGIAGLDVTLRLKMPPQETALENGEPAGSAPETDQGSGPDAVGRVQGWALTRQQLQALLLKRFLLARRSRRGLFAQIVLPALFVGLALVFSLIVPPFGHYPALRLSPTMYGAQVSFFSEDAPGDPGRARLLEALLQEAGLEEPPVQHSSHRFSAPEVPAEVAKVLASGNWTPESPSPACQCSRPGARRLLPDCPAAAGGPPPPQAVTGSGEVVQNLTGRNLSDFLVKTYPRLVRQGLKTKKWVNEVRYGGFSLGGRDPGLPSGQELGRSVEELWALLSPLPGGALDRVLKNLTAWAHSLDAQDSLKIWFNNKGWHSMVAFVNRASNAILRAHLPPGPARHAHSITTLNHPLNLTKEQLSEGALMASSVDVLVSICVVFAMSFVPASFTLVLIEERVTRAKHLQLMGGLSPTLYWLGNFLWDMCNYLVPACIVVLIFLAFQQRAYVAPANLPALLLLLLLYGWSITPLMYPASFFFSVPSTAYVVLTCINLFIGINGSMATFVLELFSDQKLQEVSRILKQVFLIFPHFCLGRGLIDMVRNQAMADAFERLGDRQFQSPLRWEVVGKNLLAMVIQGPLFLLFTLLLQHRSQLLPQPRVRSLPLLGEEDEDVARERERVVQGATQGDVLVLRNLTKVYRGQRMPAVDRLCLGIPPGECFGLLGVNGAGKTSTFRMVTGDTLASRGEAVLAGHSVAREPSAAHLSMGYCPQSDAIFELLTGREHLELLARLRGVPEAQVAQTAGSGLARLGLSWYADRPAGTYSGGNKRKLATALALVGDPAVVFLDEPTTGMDPSARRFLWNSLLAVVREGRSVMLTSHSMEECEALCSRLAIMVNGRFRCLGSPQHLKGRFAAGHTLTLRVPAARSQPAAAFVAAEFPGAELREAHGGRLRFQLPPGGRCALARVFGELAVHGAEHGVEDFSVSQTMLEEVFLYFSKDQGKDEDTEEQKEAGVGVDPAPGLQHPKRVSQFLDDPSTAETVL

SEQ ID NO: 16824 - protein, 49 aa, Artificial Sequence
  Synthetic polypeptide
APHHSLPVHLEWPLPTQWWLCLHPGPRRPLQHGRHPAPPGRLSSVQRAV

SEQ ID NO: 16825 - protein, 1311 aa, Artificial Sequence
  Synthetic polypeptide
APPPLPPREPPTTPSPSILSGLFPPSGGSAFILGHDVRSSMAAIRPHLGVCPQYNVLFDMLTVDEHVWFYGRLKGLSAAVVGPEQDRLLQDVGLVSKQSVQTRHLSGGMQRKLSVAIAFVGGSQVVILDEPTAGVDPASRRGIWELLLKYREGRTLILSTHHLDEAELLGDRVAVVAGGRLCCCGSPLFLRRHLGSGYYLTLVKARLPLTTNEKADTDMEGSVDTRQEKKNGSQGSRVGTPQLLALVQHWVPGARLVEELPHELVLVLPYTGAHDGSFATLFRELDTRLAELRLTGYGISDTSLEEIFLKVVEECAADTDMEDGSCGQHLCTGIAGLDVTLRLKMPPQETALENGEPAGSAPETDQGSGPDAVGRVQGWALTRQQLQALLLKRFLLARRSRRGLFAQIVLPALFVGLALVFSLIVPPFGHYPALRLSPTMYGAQVSFFSEDAPGDPGRARLLEALLQEAGLEEPPVQHSSHRFSAPEVPAEVAKVLASGNWTPESPSPACQCSRPGARRLLPDCPAAAGGPPPPQAVTGSGEVVQNLTGRNLSDFLVKTYPRLVRQGLKTKKWVNEVRYGGFSLGGRDPGLPSGQELGRSVEELWALLSPLPGGALDRVLKNLTAWAHSLDAQDSLKIWFNNKGWHSMVAFVNRASNAILRAHLPPGPARHAHSITTLNHPLNLTKEQLSEGALMASSVDVLVSICVVFAMSFVPASFTLVLIEERVTRAKHLQLMGGLSPTLYWLGNFLWDMCNYLVPACIVVLIFLAFQQRAYVAPANLPALLLLLLLYGWSITPLMYPASFFFSVPSTAYVVLTCINLFIGINGSMATFVLELFSDQKLQEVSRILKQVFLIFPHFCLGRGLIDMVRNQAMADAFERLGDRQFQSPLRWEVVGKNLLAMVIQGPLFLLFTLLLQHRSQLLPQPRVRSLPLLGEEDEDVARERERVVQGATQGDVLVLRNLTKVYRGQRMPAVDRLCLGIPPGECFGLLGVNGAGKTSTFRMVTGDTLASRGEAVLAGHSVAREPSAAHLSMGYCPQSDAIFELLTGREHLELLARLRGVPEAQVAQTAGSGLARLGLSWYADRPAGTYSGGNKRKLATALALVGDPAVVFLDEPTTGMDPSARRFLWNSLLAVVREGRSVMLTSHSMEECEALCSRLAIMVNGRFRCLGSPQHLKGRFAAGHTLTLRVPAARSQPAAAFVAAEFPGAELREAHGGRLRFQLPPGGRCALARVFGELAVHGAEHGVEDFSVSQTMLEEVFLYFSKDQGKDEDTEEQKEAGVGVDPAPGLQHPKRVSQFLDDPSTAETVL

SEQ ID NO: 16826 - protein, 34 aa, Artificial Sequence
  Synthetic polypeptide
PHHSLPVNPPPLPPREPPHHSLPVSPPPLPPRPS

SEQ ID NO: 16827 - protein, 18 aa, Artificial Sequence
  Synthetic polypeptide
APHHSLPVNPPPLPPRPS

SEQ ID NO: 16828 - protein, 1335 aa, Artificial Sequence
  Synthetic polypeptide
PHHSLPVNPPPLPPREPPHHSLPVSPPPLPPREPPTTPSPSILSGLFPPSGGSAFILGHDVRSSMAAIRPHLGVCPQYNVLFDMLTVDEHVWFYGRLKGLSAAVVGPEQDRLLQDVGLVSKQSVQTRHLSGGMQRKLSVAIAFVGGSQVVILDEPTAGVDPASRRGIWELLLKYREGRTLILSTHHLDEAELLGDRVAVVAGGRLCCCGSPLFLRRHLGSGYYLTLVKARLPLTTNEKADTDMEGSVDTRQEKKNGSQGSRVGTPQLLALVQHWVPGARLVEELPHELVLVLPYTGAHDGSFATLFRELDTRLAELRLTGYGISDTSLEEIFLKVVEECAADTDMEDGSCGQHLCTGIAGLDVTLRLKMPPQETALENGEPAGSAPETDQGSGPDAVGRVQGWALTRQQLQALLLKRFLLARRSRRGLFAQIVLPALFVGLALVFSLIVPPFGHYPALRLSPTMYGAQVSFFSEDAPGDPGRARLLEALLQEAGLEEPPVQHSSHRFSAPEVPAEVAKVLASGNWTPESPSPACQCSRPGARRLLPDCPAAAGGPPPPQAVTGSGEVVQNLTGRNLSDFLVKTYPRLVRQGLKTKKWVNEVRYGGFSLGGRDPGLPSGQELGRSVEELWALLSPLPGGALDRVLKNLTAWAHSLDAQDSLKIWFNNKGWHSMVAFVNRASNAILRAHLPPGPARHAHSITTLNHPLNLTKEQLSEGALMASSVDVLVSICVVFAMSFVPASFTLVLIEERVTRAKHLQLMGGLSPTLYWLGNFLWDMCNYLVPACIVVLIFLAFQQRAYVAPANLPALLLLLLLYGWSITPLMYPASFFFSVPSTAYVVLTCINLFIGINGSMATFVLELFSDQKLQEVSRILKQVFLIFPHFCLGRGLIDMVRNQAMADAFERLGDRQFQSPLRWEVVGKNLLAMVIQGPLFLLFTLLLQHRSQLLPQPRVRSLPLLGEEDEDVARERERVVQGATQGDVLVLRNLTKVYRGQRMPAVDRLCLGIPPGECFGLLGVNGAGKTSTFRMVTGDTLASRGEAVLAGHSVAREPSAAHLSMGYCPQSDAIFELLTGREHLELLARLRGVPEAQVAQTAGSGLARLGLSWYADRPAGTYSGGNKRKLATALALVGDPAVVFLDEPTTGMDPSARRFLWNSLLAVVREGRSVMLTSHSMEECEALCSRLAIMVNGRFRCLGSPQHLKGRFAAGHTLTLRVPAARSQPAAAFVAAEFPGAELREAHGGRLRFQLPPGGRCALARVFGELAVHGAEHGVEDFSVSQTMLEEVFLYFSKDQGKDEDTEEQKEAGVGVDPAPGLQHPKRVSQFLDDPSTAETVL

SEQ ID NO: 16829 - protein, 49 aa, Artificial Sequence; identical to SEQ ID NO: 16820
  Synthetic polypeptide

SEQ ID NO: 16830 - protein, 66 aa, Artificial Sequence
  Synthetic polypeptide
APHHSLPVNPPPLPPREPPHHSLPVHLEWPLPTQWWLCLHPGPRRPLQHGRHPAPPGRLSSVQRAV

SEQ ID NO: 16831 - protein, 10 aa, Artificial Sequence
  Synthetic polypeptide
APPPLPPRPS

SEQ ID NO: 16832 - protein, 1311 aa, Artificial Sequence; identical to SEQ ID NO: 16823
  Synthetic polypeptide

SEQ ID NO: 16833 - protein, 35 aa, Artificial Sequence
  Synthetic polypeptide
APHHSLPVNPPPLPPREPPHHSLPVNPPPLPPRPS

SEQ ID NO: 16834 - protein, 1311 aa, Artificial Sequence; identical to SEQ ID NO: 16825
  Synthetic polypeptide

SEQ ID NO: 16835 - protein, 49 aa, Artificial Sequence; identical to SEQ ID NO: 16820
  Synthetic polypeptide

SEQ ID NO: 16836 - protein, 83 aa, Artificial Sequence
  Synthetic polypeptide
APHHSLPVNPPPLPPREPPHHSLPVNPPPLPPREPPHHSLPVHLEWPLPTQWWLCLHPGPRRPLQHGRHPAPPGRLSSVQRAV

SEQ ID NO: 16837 - protein, 10 aa, Artificial Sequence
  Synthetic polypeptide
APPPLPPRPS

SEQ ID NO: 16838 - protein, 1311 aa, Artificial Sequence; identical to SEQ ID NO: 16823
  Synthetic polypeptide

SEQ ID NO: 16839 - protein, 1345 aa, Artificial Sequence
  Synthetic polypeptide
APHHSLPVNPPPLPPREPPHHSLPVNPPPLPPREPPHHSLPVRPPTTPSPSILSGLFPPSGGSAFILGHDVRSSMAAIRPHLGVCPQYNVLFDMLTVDEHVWFYGRLKGLSAAVVGPEQDRLLQDVGLVSKQSVQTRHLSGGMQRKLSVAIAFVGGSQVVILDEPTAGVDPASRRGIWELLLKYREGRTLILSTHHLDEAELLGDRVAVVAGGRLCCCGSPLFLRRHLGSGYYLTLVKARLPLTTNEKADTDMEGSVDTRQEKKNGSQGSRVGTPQLLALVQHWVPGARLVEELPHELVLVLPYTGAHDGSFATLFRELDTRLAELRLTGYGISDTSLEEIFLKVVEECAADTDMEDGSCGQHLCTGIAGLDVTLRLKMPPQETALENGEPAGSAPETDQGSGPDAVGRVQGWALTRQQLQALLLKRFLLARRSRRGLFAQIVLPALFVGLALVFSLIVPPFGHYPALRLSPTMYGAQVSFFSEDAPGDPGRARLLEALLQEAGLEEPPVQHSSHRFSAPEVPAEVAKVLASGNWTPESPSPACQCSRPGARRLLPDCPAAAGGPPPPQAVTGSGEVVQNLTGRNLSDFLVKTYPRLVRQGLKTKKWVNEVRYGGFSLGGRDPGLPSGQELGRSVEELWALLSPLPGGALDRVLKNLTAWAHSLDAQDSLKIWFNNKGWHSMVAFVNRASNAILRAHLPPGPARHAHSITTLNHPLNLTKEQLSEGALMASSVDVLVSICVVFAMSFVPASFTLVLIEERVTRAKHLQLMGGLSPTLYWLGNFLWDMCNYLVPACIVVLIFLAFQQRAYVAPANLPALLLLLLLYGWSITPLMYPASFFFSVPSTAYVVLTCINLFIGINGSMATFVLELFSDQKLQEVSRILKQVFLIFPHFCLGRGLIDMVRNQAMADAFERLGDRQFQSPLRWEVVGKNLLAMVIQGPLFLLFTLLLQHRSQLLPQPRVRSLPLLGEEDEDVARERERVVQGATQGDVLVLRNLTKVYRGQRMPAVDRLCLGIPPGECFGLLGVNGAGKTSTFRMVTGDTLASRGEAVLAGHSVAREPSAAHLSMGYCPQSDAIFELLTGREHLELLARLRGVPEAQVAQTAGSGLARLGLSWYADRPAGTYSGGNKRKLATALALVGDPAVVFLDEPTTGMDPSARRFLWNSLLAVVREGRSVMLTSHSMEECEALCSRLAIMVNGRFRCLGSPQHLKGRFAAGHTLTLRVPAARSQPAAAFVAAEFPGAELREAHGGRLRFQLPPGGRCALARVFGELAVHGAEHGVEDFSVSQTMLEEVFLYFSKDQGKDEDTEEQKEAGVGVDPAPGLQHPKRVSQFLDDPSTAETVL

SEQ ID NO: 16840 - protein, 58 aa, Artificial Sequence
  Synthetic polypeptide
APPPLPPREAPHHSLPVHLEWPLPTQWWLCLHPGPRRPLQHGRHPAPPGRLSSVQRAV

SEQ ID NO: 16841 - protein, 10 aa, Artificial Sequence
  Synthetic polypeptide
GPPPLPPRPS

SEQ ID NO: 16842 - protein, 27 aa, Artificial Sequence
  Synthetic polypeptide
APPPLPPREAPHHSLPVNPPPLPPRPS

SEQ ID NO: 16843 - protein, 1311 aa, Artificial Sequence
  Synthetic polypeptide
GPPPLPPREPPTTPSPSILSGLFPPSGGSAFILGHDVRSSMAAIRPHLGVCPQYNVLFDMLTVDEHVWFYGRLKGLSAAVVGPEQDRLLQDVGLVSKQSVQTRHLSGGMQRKLSVAIAFVGGSQVVILDEPTAGVDPASRRGIWELLLKYREGRTLILSTHHLDEAELLGDRVAVVAGGRLCCCGSPLFLRRHLGSGYYLTLVKARLPLTTNEKADTDMEGSVDTRQEKKNGSQGSRVGTPQLLALVQHWVPGARLVEELPHELVLVLPYTGAHDGSFATLFRELDTRLAELRLTGYGISDTSLEEIFLKVVEECAADTDMEDGSCGQHLCTGIAGLDVTLRLKMPPQETALENGEPAGSAPETDQGSGPDAVGRVQGWALTRQQLQALLLKRFLLARRSRRGLFAQIVLPALFVGLALVFSLIVPPFGHYPALRLSPTMYGAQVSFFSEDAPGDPGRARLLEALLQEAGLEEPPVQHSSHRFSAPEVPAEVAKVLASGNWTPESPSPACQCSRPGARRLLPDCPAAAGGPPPPQAVTGSGEVVQNLTGRNLSDFLVKTYPRLVRQGLKTKKWVNEVRYGGFSLGGRDPGLPSGQELGRSVEELWALLSPLPGGALDRVLKNLTAWAHSLDAQDSLKIWFNNKGWHSMVAFVNRASNAILRAHLPPGPARHAHSITTLNHPLNLTKEQLSEGALMASSVDVLVSICVVFAMSFVPASFTLVLIEERVTRAKHLQLMGGLSPTLYWLGNFLWDMCNYLVPACIVVLIFLAFQQRAYVAPANLPALLLLLLLYGWSITPLMYPASFFFSVPSTAYVVLTCINLFIGINGSMATFVLELFSDQKLQEVSRILKQVFLIFPHFCLGRGLIDMVRNQAMADAFERLGDRQFQSPLRWEVVGKNLLAMVIQGPLFLLFTLLLQHRSQLLPQPRVRSLPLLGEEDEDVARERERVVQGATQGDVLVLRNLTKVYRGQRMPAVDRLCLGIPPGECFGLLGVNGAGKTSTFRMVTGDTLASRGEAVLAGHSVAREPSAAHLSMGYCPQSDAIFELLTGREHLELLARLRGVPEAQVAQTAGSGLARLGLSWYADRPAGTYSGGNKRKLATALALVGDPAVVFLDEPTTGMDPSARRFLWNSLLAVVREGRSVMLTSHSMEECEALCSRLAIMVNGRFRCLGSPQHLKGRFAAGHTLTLRVPAARSQPAAAFVAAEFPGAELREAHGGRLRFQLPPGGRCALARVFGELAVHGAEHGVEDFSVSQTMLEEVFLYFSKDQGKDEDTEEQKEAGVGVDPAPGLQHPKRVSQFLDDPSTAETVL

SEQ ID NO: 16844 - protein, 49 aa, Artificial Sequence; identical to SEQ ID NO: 16820
  Synthetic polypeptide

SEQ ID NO: 16845 - protein, 75 aa, Artificial Sequence
  Synthetic polypeptide
APPPLPPREAPHHSLPVNPPPLPPREPPHHSLPVHLEWPLPTQWWLCLHPGPRRPLQHGRHPAPPGRLSSVQRAV

SEQ ID NO: 16846 - protein, 10 aa, Artificial Sequence
  Synthetic polypeptide
APPPLPPRPS

SEQ ID NO: 16847 - protein, 1311 aa, Artificial Sequence; identical to SEQ ID NO: 16823
  Synthetic polypeptide

SEQ ID NO: 16848 - protein, 44 aa, Artificial Sequence
  Synthetic polypeptide
APPPLPPREAPHHSLPVNPPPLPPREPPHHSLPVNPPPLPPRPS

SEQ ID NO: 16849 - protein, 1311 aa, Artificial Sequence; identical to SEQ ID NO: 16825
  Synthetic polypeptide

SEQ ID NO: 16850 - protein, 49 aa, Artificial Sequence; identical to SEQ ID NO: 16820
  Synthetic polypeptide

SEQ ID NO: 16851 - protein, 13 aa, Artificial Sequence
  Synthetic polypeptide
KLAGHGDSRRVTH

SEQ ID NO: 16852 - protein, 126 aa, Artificial Sequence; identical to SEQ ID NO: 3315
  Synthetic polypeptide

SEQ ID NO: 16853 - protein, 38 aa, Artificial Sequence
  Synthetic polypeptide
AVITPPHFNLGNRARDPISKKKDQRMLGQQRRLFPRLQ

SEQ ID NO: 16854 - protein, 57 aa, Artificial Sequence
  Synthetic polypeptide
KKGPTNAWTTTAAVPTSAMTLRSATSACAPTASSWWPSEDAKISMSVRIPTPAASSA

SEQ ID NO: 16855 - protein, 515 aa, Artificial Sequence
  Synthetic polypeptide
SHHHTSIWATEQETLSLKKRTNECLDNNGGCSHVCNDLKIGYECLCPDGFQLVAQRRCEDIDECQDPDTCSQLCVNLEGGYKCQCEEGFQLDPHTKACKAVGSIAYLFFTNRHEVRKMTLDRSEYTSLIPNLRNVVALDTEVASNRIYWSDLSQRMICSTQLDRAHGVSSYDTVISRDIQAPDGLAVDWIHSNIYWTDSVLGTVSVADTKGVKRKTLFRENGSKPRAIVVDPVHGFMYWTDWGTPAKIKKGGLNGVDIYSLVTENIQWPNGITLDLLSGRLYWVDSKLHSISSIDVNGGNRKTILEDEKRLAHPFSLAVFEDKVFWTDIINEAIFSANRLTGSDVNLLAENLLSPEDMVLFHNLTQPREAEAAVATQETSTVRLKVSSTAVRTQHTTTRPVPDTSRLPGATPGLTTVEIVTMSHQALGDVAGRGNEKKPSSVRALSIVLPIVLLVFLCLGVFLLWKNWRLKNINSINFDNPVYQKTTEDEVHICHNQDGYSYPSRQMVSLEDDVA

SEQ ID NO: 16856 - protein, 654 aa, Artificial Sequence
  Synthetic polypeptide
SHHHTSIWATEQETLSLKKRTNECLDNNGGCSHVCNDLKIGYECLCPDGFQLVAQRRCEDIDECQDPDTCSQLCVNLEGGYKCQCEEGFQLDPHTKACKAVGSIAYLFFTNRHEVRKMTLDRSEYTSLIPNLRNVVALDTEVASNRIYWSDLSQRMICSTQLDRAHGVSSYDTVISRDIQAPDGLAVDWIHSNIYWTDSVLGTVSVADTKGVKRKTLFRENGSKPRAIVVDPVHGFMYWTDWGTPAKIKKGGLNGVDIYSLVTENIQWPNGITLDLLSGRLYWVDSKLHSISSIDVNGGNRKTILEDEKRLAHPFSLAVFEDKVFWTDIINEAIFSANRLTGSDVNLLAENLLSPEDMVLFHNLTQPRGVNWCERTTLSNGGCQYLCLPAPQINPHSPKFTCACPDGMLLARDMRSCLTEAEAAVATQETSTVRLKVSSTAVRTQHTTTRPVPDTSRLPGATPGLTTVEIVTMSHQALGDVAGRGNEKKPSSVRALSIVLPIATELGLWSRGQLCDRACLSLQCSSSSFAWGSSFYGRTGGLRTSTASTLTTPSIRRPQRMRSTFATTRTATATPRDRWSVWRMTWREHLPGVPSLPRTLPETSPALFYSKTEKTKALPARALFYIFIHLGGRTGFGQCPCNGLGWDFGFFLSS

SEQ ID NO: 16857 - protein, 564 aa, Artificial Sequence
  Synthetic polypeptide
SHHHTSIWATEQETLSLKKRTNECLDNNGGCSHVCNDLKIGYECLCPDGFQLVAQRRCEDIDECQDPDTCSQLCVNLEGGYKCQCEEGFQLDPHTKACKAVGSIAYLFFTNRHEVRKMTLDRSEYTSLIPNLRNVVALDTEVASNRIYWSDLSQRMICSTQLDRAHGVSSYDTVISRDIQAPDGLAVDWIHSNIYWTDSVLGTVSVADTKGVKRKTLFRENGSKPRAIVVDPVHGFMYWTDWGTPAKIKKGGLNGVDIYSLVTENIQWPNGITLDLLSGRLYWVDSKLHSISSIDVNGGNRKTILEDEKRLAHPFSLAVFEDKVFWTDIINEAIFSANRLTGSDVNLLAENLLSPEDMVLFHNLTQPRGVNWCERTTLSNGGCQYLCLPAPQINPHSPKFTCACPDGMLLARDMRSCLTEAEAAVATQETSTVRLKVSSTAVRTQHTTTRPVPDTSRLPGATPGLTTVEIVTMSHQALGDVAGRGNEKKPSSVRALSIVLPIVLLVFLCLGVFLLWKNWRLKNINSINFDNPVYQKTTEDEVHICHNQDGYSYPSMVSLEDDVA

SEQ ID NO: 16858 - protein, 566 aa, Artificial Sequence
  Synthetic polypeptide
SHHHTSIWATEQETLSLKKRTNECLDNNGGCSHVCNDLKIGYECLCPDGFQLVAQRRCEDIDECQDPDTCSQLCVNLEGGYKCQCEEGFQLDPHTKACKAVGSIAYLFFTNRHEVRKMTLDRSEYTSLIPNLRNVVALDTEVASNRIYWSDLSQRMICSTQLDRAHGVSSYDTVISRDIQAPDGLAVDWIHSNIYWTDSVLGTVSVADTKGVKRKTLFRENGSKPRAIVVDPVHGFMYWTDWGTPAKIKKGGLNGVDIYSLVTENIQWPNGITLDLLSGRLYWVDSKLHSISSIDVNGGNRKTILEDEKRLAHPFSLAVFEDKVFWTDIINEAIFSANRLTGSDVNLLAENLLSPEDMVLFHNLTQPRGVNWCERTTLSNGGCQYLCLPAPQINPHSPKFTCACPDGMLLARDMRSCLTEAEAAVATQETSTVRLKVSSTAVRTQHTTTRPVPDTSRLPGATPGLTTVEIVTMSHQALGDVAGRGNEKKPSSVRALSIVLPIVLLVFLCLGVFLLWKNWRLKNINSINFDNPVYQKTTEDEVHICHNQDGYSYPSRQMVSLEDDVA

SEQ ID NO: 16859 - protein, 40 aa, Artificial Sequence; identical to SEQ ID NO: 5798
  Synthetic polypeptide

SEQ ID NO: 16860 - protein, 206 aa, Artificial Sequence; identical to SEQ ID NO: 2848
  Synthetic polypeptide

SEQ ID NO: 16861 - protein, 345 aa, Artificial Sequence; identical to SEQ ID NO: 2363
  Synthetic polypeptide

SEQ ID NO: 16862 - protein, 255 aa, Artificial Sequence; identical to SEQ ID NO: 2642
  Synthetic polypeptide

SEQ ID NO: 16863 - protein, 257 aa, Artificial Sequence; identical to SEQ ID NO: 2633
  Synthetic polypeptide

SEQ ID NO: 16864 - protein, 43 aa, Artificial Sequence; identical to SEQ ID NO: 5565
  Synthetic polypeptide

SEQ ID NO: 16865 - protein, 31 aa, Artificial Sequence
  Synthetic polypeptide
SRWTKYFGQISSTKPFSVPTASQVPMSTCWL

SEQ ID NO: 16866 - protein, 51 aa, Artificial Sequence
  Synthetic polypeptide
SRWTKYFGQISSTKPFSVPTASQVPMSTCWLKTYCPQRIWFSSTTSPSQEE

SEQ ID NO: 16867 - protein, 65 aa, Artificial Sequence
  Synthetic polypeptide
SRWTKYFGQISSTKPFSVPTASQVPMSTCWLKTYCPQRIWFSSTTSPSQERLRLQWPPRRHPPSG

SEQ ID NO: 16868 - protein, 29 aa, Artificial Sequence
  Synthetic polypeptide
PGTVAHACNPSTLGGRGGRSQVLWGFCCL

SEQ ID NO: 16869 - protein, 98 aa, Artificial Sequence
  Synthetic polypeptide
RGRWLTPVIPALWEAEEGDHKFYGASVAYENALRVFNIVFTSLFSLECVLKVMAFGILNYFRDAWNIFDFVTVLGSITDILVTEFGAWSRATPPSPRS

SEQ ID NO: 16870 - protein, 696 aa, Artificial Sequence
  Synthetic polypeptide
RGRWLTPVIPALWEAEEGDHKFYGASVAYENALRVFNIVFTSLFSLECVLKVMAFGILNYFRDAWNIFDFVTVLGSITDILVTEFGNNFINLSFLRLFRAARLIKLLRQGYTIRILLWTFVQSFKALPYVCLLIAMLFFIYAIIGMQVFGNIGIDVEDEDSDEDEFQITEHNNFRTFFQALMLLFRSATGEAWHNIMLSCLSGKPCDKNSGILTRECGNEFAYFYFVSFIFLCSFLMLNLFVAVIMDNFEYLTRDSSILGPHHLDEYVRVWAEYDPAACGRIHYKDMYSLLRVISPPLGLGKKCPHRVACKRLLRMDLPVADDNTVHFNSTLMALIRTALDIKIAKGGADKQQMDAELRKEMMAIWPNLSQKTLDLLVTPHKSTDLTVGKIYAAMMIMEYYRQSKAKKLQAMREEQDRTPLMFQRMEPPSPTQEGGPGQNALPSTQLDPGGALMAHESGLKESPSWVTQRAQEMFQKTGTWSPEQGPPTDMPNSQPNSQSVEMREMGRDGYSDSEHYLPMEGQGRAASMPRLPAENQRRRGRPRGNNLSTISDTSPMKRSASVLGPKARRLDDYSLERVPPEENQRHHQRRRDRSHRASERSLGRYTDVDTGLGTDLSMTTQSGDLPSKERDQERGRPKDRKHRQHHHHHHHHHHPPPPDKDRYAQERPDHGRARARDQRWSRSPSEGREHMAHRQ

SEQ ID NO: 16871 - protein, 930 aa, Artificial Sequence
  Synthetic polypeptide
RGRWLTPVIPALWEAEEGDHKFYGASVAYENALRVFNIVFTSLFSLECVLKVMAFGILNYFRDAWNIFDFVTVLGSITDILVTEFGNNFINLSFLRLFRAARLIKLLRQGYTIRILLWTFVQSFKALPYVCLLIAMLFFIYAIIGMQVFGNIGIDVEDEDSDEDEFQITEHNNFRTFFQALMLLFRSATGEAWHNIMLSCLSGKPCDKNSGILTRECGNEFAYFYFVSFIFLCSFLMLNLFVAVIMDNFEYLTRDSSILGPHHLDEYVRVWAEYDPAACGRIHYKDMYSLLRVISPPLGLGKKCPHRVACKRLLRMDLPVADDNTVHFNSTLMALIRTALDIKIAKGGADKQQMDAELRKEMMAIWPNLSQKTLDLLVTPHKSTDLTVGKIYAAMMIMEYYRQSKAKKLQAMREEQDRTPLMFQRMEPPSPTQEGGPGQNALPSTQLDPGGALMAHESGLKESPSWVTQRAQEMFQKTGTWSPEQGPPTDMPNSQPNSQSVEMREMGRDGYSDSEHYLPMEGQGRAASMPRLPAENQTISDTSPMKRSASVLGPKARRLDDYSLERVPPEENQRHHQRRRDRSHRASERSLGRYTDVDTGLGTDLSMTTQSGDLPSKERDQERGRPKDRKHRQHHHHHHHHHHPPPPDKDRYAQERPDHGRARARDQRWSRSPSEGREHMAHRQGSSSVSGSPAPSTSGTSTPRRGRRQLPQTPSTPRPHVSYSPVIRKAGGSGPPQQQQQQQQQQQQQAVARPGRAATSGPRRYPGPTAEPLAGDRPPTGGHSSGRSPRMERRVPGPARSESPRACRHGGARWPASGPHVSEGPPGPRHHGYYRGSDYDEADGPGSGGGEEAMAGAYDAPPPVRHASSGATGRSPRTPRASGPACASPSRHGRRLPNGYYPAHGLARPRGPGSRKGLHEPYSESDDDWC

SEQ ID NO: 16872 - protein, 942 aa, Artificial Sequence
  Synthetic polypeptide
RGRWLTPVIPALWEAEEGDHKFYGASVAYENALRVFNIVFTSLFSLECVLKVMAFGILNYFRDAWNIFDFVTVLGSITDILVTEFGNNFINLSFLRLFRAARLIKLLRQGYTIRILLWTFVQSFKALPYVCLLIAMLFFIYAIIGMQVFGNIGIDVEDEDSDEDEFQITEHNNFRTFFQALMLLFRSATGEAWHNIMLSCLSGKPCDKNSGILTRECGNEFAYFYFVSFIFLCSFLMLNLFVAVIMDNFEYLTRDSSILGPHHLDEYVRVWAEYDPAAWGRMPYLDMYQMLRHMSPPLGLGKKCPARVAYKRLLRMDLPVADDNTVHFNSTLMALIRTALDIKIAKGGADKQQMDAELRKEMMAIWPNLSQKTLDLLVTPHKSTDLTVGKIYAAMMIMEYYRQSKAKKLQAMREEQDRTPLMFQRMEPPSPTQEGGPGQNALPSTQLDPGGALMAHESGLKESPSWVTQRAQEMFQKTGTWSPEQGPPTDMPNSQPNSQSVEMREMGRDGYSDSEHYLPMEGQGRAASMPRLPAENQRRRGRPRGNNLSTISDTSPMKRSASVLGPKARRLDDYSLERVPPEENQRHHQRRRDRSHRASERSLGRYTDVDTGLGTDLSMTTQSGDLPSKERDQERGRPKDRKHRQHHHHHHHHHHPPPPDKDRYAQERPDHGRARARDQRWSRSPSEGREHMAHRQGSSSVSGSPAPSTSGTSTPRRGRRQLPQTPSTPRPHVSYSPVIRKAGGSGPPQQQQQQQQQQQQQAVARPGRAATSGPRRYPGPTAEPLAGDRPPTGGHSSGRSPRMERRVPGPARSESPRACRHGGARWPASGPHVSEGPPGPRHHGYYRGSDYDEADGPGSGGGEEAMAGAYDAPPPVRHASSGATGRSPRTPRASGPACASPSRHGRRLPNGYYPAHGLARPRGPGSRKGLHEPYSESDDDWC

SEQ ID NO: 16873 - protein, 930 aa, Artificial Sequence
  Synthetic polypeptide
RGRWLTPVIPALWEAEEGDHKFYGASVAYENALRVFNIVFTSLFSLECVLKVMAFGILNYFRDAWNIFDFVTVLGSITDILVTEFGNNFINLSFLRLFRAARLIKLLRQGYTIRILLWTFVQSFKALPYVCLLIAMLFFIYAIIGMQVFGNIGIDVEDEDSDEDEFQITEHNNFRTFFQALMLLFRSATGEAWHNIMLSCLSGKPCDKNSGILTRECGNEFAYFYFVSFIFLCSFLMLNLFVAVIMDNFEYLTRDSSILGPHHLDEYVRVWAEYDPAAWGRMPYLDMYQMLRHMSPPLGLGKKCPARVAYKRLLRMDLPVADDNTVHFNSTLMALIRTALDIKIAKGGADKQQMDAELRKEMMAIWPNLSQKTLDLLVTPHKSTDLTVGKIYAAMMIMEYYRQSKAKKLQAMREEQDRTPLMFQRMEPPSPTQEGGPGQNALPSTQLDPGGALMAHESGLKESPSWVTQRAQEMFQKTGTWSPEQGPPTDMPNSQPNSQSVEMREMGRDGYSDSEHYLPMEGQGRAASMPRLPAENQTISDTSPMKRSASVLGPKARRLDDYSLERVPPEENQRHHQRRRDRSHRASERSLGRYTDVDTGLGTDLSMTTQSGDLPSKERDQERGRPKDRKHRQHHHHHHHHHHPPPPDKDRYAQERPDHGRARARDQRWSRSPSEGREHMAHRQGSSSVSGSPAPSTSGTSTPRRGRRQLPQTPSTPRPHVSYSPVIRKAGGSGPPQQQQQQQQQQQQQAVARPGRAATSGPRRYPGPTAEPLAGDRPPTGGHSSGRSPRMERRVPGPARSESPRACRHGGARWPASGPHVSEGPPGPRHHGYYRGSDYDEADGPGSGGGEEAMAGAYDAPPPVRHASSGATGRSPRTPRASGPACASPSRHGRRLPNGYYPAHGLARPRGPGSRKGLHEPYSESDDDWC

SEQ ID NO: 16874 - protein, 41 aa, Artificial Sequence
  Synthetic polypeptide
SQHFGRPRRAITSSMGLLLLMKMPCGCSTSSSPPSSLWNVC

SEQ ID NO: 16875 - protein, 1606 aa, Artificial Sequence; identical to SEQ ID NO: 1451
  Synthetic polypeptide

SEQ ID NO: 16876 - protein, 1852 aa, Artificial Sequence; identical to SEQ ID NO: 1447
  Synthetic polypeptide

SEQ ID NO: 16877 - protein, 17 aa, Artificial Sequence
  Synthetic polypeptide
KEQPLVDKYPSSLTLRS

SEQ ID NO: 16878 - protein, 181 aa, Artificial Sequence; identical to SEQ ID NO: 2963
  Synthetic polypeptide

SEQ ID NO: 16879 - protein, 35 aa, Artificial Sequence
  Synthetic polypeptide
GRVPWLTPVIPALWEAEAGESQVSPMPVSTRPRSS

SEQ ID NO: 16880 - protein, 178 aa, Artificial Sequence
  Synthetic polypeptide
PGAMAHACNPSTLGGRGGRITSEPHARFYAAQIVLTFEYLHSLDLIYRDLKPENLLIDQQGYIQVTDFGFAKRVKGRTWTLCGTPEYLAPEIILSKGYNKAVDWWALGVLIYEMAAGYPPFFADQPIQIYEKIVSGKVEAPFIPKFKGPGDTSNFDDYEEEEIRVSINEKCGKEFSEF

SEQ ID NO: 16881 - protein, 233 aa, Artificial Sequence
  Synthetic polypeptide
PGAMAHACNPSTLGGRGGRITSEPHARFYAAQIVLTFEYLHSLDLIYRDLKPENLLIDQQGYIQVTDFGFAKRVKGRTWTLCGTPEYLAPEIILSKGYNKAVDWWALGVLIYEMAAGYPPFFADQPIQIYEKIVSGKVRFPSHFSSDLKDLLRNLLQVDLTKRFGNLKNGVNDIKNHKWFATTDWIAIYQRKVEAPFIPKFKGPGDTSNFDDYEEEEIRVSINEKCGKEFSEF

SEQ ID NO: 16882 - protein, 106 aa, Artificial Sequence
  Synthetic polypeptide
PGAMAHACNPSTLGGRGGRITSEPHARFYAAQIVLTFEYLHSLDLIYRDLKPENLLIDQQGYIQVTDFGFAKRVKGRTWTLCGTPEYLAPEIILSKVGASPALPFP

SEQ ID NO: 16883 - protein, 14 aa, Artificial Sequence
  Synthetic polypeptide
AMITPLLSVLGNRV

SEQ ID NO: 16884 - protein, 1385 aa, Artificial Sequence
  Synthetic polypeptide
SHRCSPSWAIECNNRTQCVVVAGSDAFPDPCPGTYKYLEVQYDCVPYIFVCPGTLQKVLEPTSTHESEHQSGAWCKDPLQAGDRIYVMPWIPYRTDTLTEYASWEDYVAARHTTTYRLPNRVDGTGFVVYDGAVFYNKERTRNIVKYDLRTRIKSGETVINTANYHDTSPYRWGGKTDIDLAVDENGLWVIYATEGNNGRLVVSQLNPYTLRFEGTWETGYDKRSASNAFMVCGVLYVLRSVYVDDDSEAAGNRVDYAFNTNANREEPVSLTFPNPYQFISSVDYNPRDNQLYVWNNYFVVRYSLEFGPPDPSAGPATSPPLSTTTTARPTPLTSTASPAATTPLRRAPLTTHPVGAINQLGPDLPPATAPVPSTRRPPAPNLHVSPELFCEPREVRRVQWPATQQGMLVERPCPKGTRGIASFQCLPALGLWNPRGPDLSNCTSPWVNQVAQKIKSGENAANIASELARHTRGSIYAGDVSSSVKLMEQLLDILDAQLQALRPIERESAGKNYNKMHKRERTCKDYIKAVVETVDNLLRPEALESWKDMNATEQVHTATMLLDVLEEGAFLLADNVREPARFLAAKENVVLEVTVLNTEGQVQELVFPQEEYPRKNSIQLSAKTIKQNSRNGVVKVVFILYNNLGLFLSTENATVKLAGEAGPGGPGGASLVVNSQVIAASINKESSRVFLMDPVIFTVAHLEDKNHFNANCSFWNYSERSMLGYWSTQGCRLVESNKTHTTCACSHLTNFAVLMAHREIYQGRINELLLSVITWVGIVISLVCLAICISTFCFLRGLQTDRNTIHKNLCINLFLAELLFLVGIDKTQYEIACPIFAGLLHYFFLAAFSWLCLEGVHLYLLLVEVFESEYSRTKYYYLGGYCFPALVVGIAAAIDYRSYGTEKACWLRVDNYFIWSFIGPVSFVIVVNLVFLMVTLHKMIRSSSVLKPDSSRLDNIKSWALGAIALLFLLGLTWAFGLLFINKESVVMAYLFTTFNAFQGVFIFVFHCALQKKVHKEYSKCLRHSYCCIRSPPGGTHGSLKTSAMRSNTRYYTGTQSRIRRMWNDTVRKQTESSFMAGDINSTPTLNRGTMGNHLLTNPVLQPRGGTSPYNTLIAESVGFNPSSPPVFNSPGSYREPKHPLGGREACGMDTLPLNGNFNNSYSLRSGDFPPGDGGPEPPRGRNLADAAAFEKMIISELVHNNLRGSSSAAKGPPPPEPPVPPVPGGGGEEEAGGPGGADRAEIELLYKALEEPLLLPRAQSVLYQSDLDESESCTAEDGATSRPLSSPPGRDSLYASGANLRDSPSYPDSSPEGPSEALPPPPPAPPGPPEIYYTSRPPALVARNPLQGYYQVRRPSHEGYLAAPGLEGPGPDGDGQMQLVTSL

SEQ ID NO: 16885 - protein, 1390 aa, Artificial Sequence
  Synthetic polypeptide
SHRCSPSWAIECNNRTQCVVVAGSDAFPDPCPGTYKYLEVQYDCVPYKVEQKVFVCPGTLQKVLEPTSTHESEHQSGAWCKDPLQAGDRIYVMPWIPYRTDTLTEYASWEDYVAARHTTTYRLPNRVDGTGFVVYDGAVFYNKERTRNIVKYDLRTRIKSGETVINTANYHDTSPYRWGGKTDIDLAVDENGLWVIYATEGNNGRLVVSQLNPYTLRFEGTWETGYDKRSASNAFMVCGVLYVLRSVYVDDDSEAAGNRVDYAFNTNANREEPVSLTFPNPYQFISSVDYNPRDNQLYVWNNYFVVRYSLEFGPPDPSAGPATSPPLSTTTTARPTPLTSTASPAATTPLRRAPLTTHPVGAINQLGPDLPPATAPVPSTRRPPAPNLHVSPELFCEPREVRRVQWPATQQGMLVERPCPKGTRGIASFQCLPALGLWNPRGPDLSNCTSPWVNQVAQKIKSGENAANIASELARHTRGSIYAGDVSSSVKLMEQLLDILDAQLQALRPIERESAGKNYNKMHKRERTCKDYIKAVVETVDNLLRPEALESWKDMNATEQVHTATMLLDVLEEGAFLLADNVREPARFLAAKENVVLEVTVLNTEGQVQELVFPQEEYPRKNSIQLSAKTIKQNSRNGVVKVVFILYNNLGLFLSTENATVKLAGEAGPGGPGGASLVVNSQVIAASINKESSRVFLMDPVIFTVAHLEDKNHFNANCSFWNYSERSMLGYWSTQGCRLVESNKTHTTCACSHLTNFAVLMAHREIYQGRINELLLSVITWVGIVISLVCLAICISTFCFLRGLQTDRNTIHKNLCINLFLAELLFLVGIDKTQYEIACPIFAGLLHYFFLAAFSWLCLEGVHLYLLLVEVFESEYSRTKYYYLGGYCFPALVVGIAAAIDYRSYGTEKACWLRVDNYFIWSFIGPVSFVIVVNLVFLMVTLHKMIRSSSVLKPDSSRLDNIKSWALGAIALLFLLGLTWAFGLLFINKESVVMAYLFTTFNAFQGVFIFVFHCALQKKVHKEYSKCLRHSYCCIRSPPGGTHGSLKTSAMRSNTRYYTGTQSRIRRMWNDTVRKQTESSFMAGDINSTPTLNRGTMGNHLLTNPVLQPRGGTSPYNTLIAESVGFNPSSPPVFNSPGSYREPKHPLGGREACGMDTLPLNGNFNNSYSLRSGDFPPGDGGPEPPRGRNLADAAAFEKMIISELVHNNLRGSSSAAKGPPPPEPPVPPVPGGGGEEEAGGPGGADRAEIELLYKALEEPLLLPRAQSVLYQSDLDESESCTAEDGATSRPLSSPPGRDSLYASGANLRDSPSYPDSSPEGPSEALPPPPPAPPGPPEIYYTSRPPALVARNPLQGYYQVRRPSHEGYLAAPGLEGPGPDGDGQMQLVTSL

SEQ ID NO: 16886 - protein, 81 aa, Artificial Sequence
  Synthetic polypeptide
SVTTAPSAWWSPARMPFLTPVLGPTSTWRCSTTVSPTKWSRKSSCAQGPCRRCWSPPRHTSQSTSLAHGARTRCRRVTAST

SEQ ID NO: 16887 - protein, 76 aa, Artificial Sequence
  Synthetic polypeptide
SVTTAPSAWWSPARMPFLTPVLGPTSTWRCSTTVSPTSSCAQGPCRRCWSPPRHTSQSTSLAHGARTRCRRVTAST

SEQ ID NO: 16888 - protein, 61 aa, Artificial Sequence
  Synthetic polypeptide
EKSKGPPEGAGMWTSAAPGSISVTAPPSASTPWVHTAAAAAQAGSPDTESRITKRTLSVKI

SEQ ID NO: 16889 - protein, 40 aa, Artificial Sequence
  Synthetic polypeptide
MEAPGCARRSFILLRLDEKRARVLRKELGCGRVQLRAASV

SEQ ID NO: 16890 - protein, 70 aa, Artificial Sequence
  Synthetic polypeptide
MRKEQGSSGRSWDVDECSSGQHQCDSSTVCFNTVGSYSCRCRPGWKPRHGIPNNQKDTVCEDMTFSTWTP

SEQ ID NO: 16891 - protein, 639 aa, Artificial Sequence
  Synthetic polypeptide
MRKEQGSSGRSWDVDECSSGQHQCDSSTVCFNTVGSYSCRCRPGWKPRHGIPNNQKDTVCEDMTFSTWTPPPGVHSQTLSRFFDKVQDLGRDSKTSSAEVTIQNVIKLVDELMEAPGDVEALAPPVRHLIATQLLSNLEDIMRILAKSLPKGPFTYISPSNTELTLMIQERGDKNVTMGQSSARMKLNWAVAAGAEDPGPAVAGILSIQNMTTLLANASLNLHSKKQAELEEIYESSIRGVQLRRLSAVNSIFLSHNNTKELNSPILFAFSHLESSDGEAGRDPPAKDVMPGPRQELLCAFWKSDSDRGGHWATEGCQVLGSKNGSTTCQCSHLSSFAILMAHYDVEDWKLTLITRVGLALSLFCLLLCILTFLLVRPIQGSRTTIHLHLCICLFVGSTIFLAGIENEGGQVGLRCRLVAGLLHYCFLAAFCWMSLEGLELYFLVVRVFQGQGLSTRWLCLIGYGVPLLIVGVSAAIYSKGYGRPRYCWLDFEQGFLWSFLGPVTFIILCNAVIFVTTVWKLTQKFSEINPDMKKLKKARALTITAIAQLFLLGCTWVFGLFIFDDRSLVLTYVFTILNCLQGAFLYLLHCLLNKKVREEYRKWACLVAGGSKYSEFTSTTSGTGHNQTRALRASESGI

SEQ ID NO: 16892 - protein, 27 aa, Artificial Sequence
  Synthetic polypeptide
GHSGARLSSSHLFGRLRFGKNTGSGPA

SEQ ID NO: 16893 - protein, 44 aa, Artificial Sequence
  Synthetic polypeptide
GSGRIPEVGLPSCWGEQVLRIHLHHVWHWPQSDPGPQGIRVRHM

SEQ ID NO: 16894 - protein, 60 aa, Artificial Sequence
  Synthetic polypeptide
WAQWRTPVILPPIWEAEVREEYRKWACLVAGGSKYSEFTSTTSGTGHNQTRALRASESGI

SEQ ID NO: 16895 - protein, 90 aa, Artificial Sequence
  Synthetic polypeptide
GHSGARLSSSHLFGRLRWEDCLSPEVGDQPGQHNQMLSLQKNSKIARVREEYRKWACLVAGGSKYSEFTSTTSGTGHNQTRALRASESGI

SEQ ID NO: 16896 - protein, 57 aa, Artificial Sequence
  Synthetic polypeptide
PDAVFTKKFKDSQGSGRIPEVGLPSCWGEQVLRIHLHHVWHWPQSDPGPQGIRVRHM

SEQ ID NO: 16897 - protein, 12 aa, Artificial Sequence
  Synthetic polypeptide
PGFGKNTGSGPA

SEQ ID NO: 16898 - protein, 8 aa, Artificial Sequence
  Synthetic polypeptide
GHLPQPCH

SEQ ID NO: 16899 - protein, 492 aa, Artificial Sequence
  Synthetic polypeptide
GRALWLTPVIPILREAEADGSFEVTFRNPVIERIPRLRRQKKIFSKQQGKAFQRARQMNIDVATWVRLLRRLIPNATGTGTFSPGASPGSEARTTGDISVEKLNLGTDSDSSPQKSSRDPPSSPSSLSSPIQESTAPELPSETQETPGPALCSPLRKSPLTLEDFKFLAVLGRGHFGKVLLSEFRPSGELFAIKALKKGDIVARDEVESLMCEKRILAAVTSAGHPFLVNLFGCFQTPEHVCFVMEYSAGGDLMLHIHSDVFSEPRAIFYSACVVLGLQFLHEHKIVYRDLKLDNLLLDTEGYVKIADFGLCKEGMGYGDRTSTFCGTPEFLAPEVLTDTSYTRAVDWWGLGVLLYEMLVGESPFPGDDEEEVFDSIVNDEVRYPRFLSAEAIGIMRRLLRRNPERRLGSSERDAEDVKKQPFFRTLGWEALLARRLPPPFVPTLSGRTDVSNFDEEFTGEAPTLSPPRDARPLTAAEQAAFLDFDFVAGGC

SEQ ID NO: 16900 - protein, 48 aa, Artificial Sequence
  Synthetic polypeptide
SQYFGRLRRMDHLRSPSATLSLRGFLGSDGRRKFSPSSKGRRSSVLGR

SEQ ID NO: 16901 - protein, 61 aa, Artificial Sequence; identical to SEQ ID NO: 4670
  Synthetic polypeptide

SEQ ID NO: 16902 - protein, 38 aa, Artificial Sequence; identical to SEQ ID NO: 5904
  Synthetic polypeptide

SEQ ID NO: 16903 - protein, 229 aa, Artificial Sequence; identical to SEQ ID NO: 2756
  Synthetic polypeptide

SEQ ID NO: 16904 - protein, 632 aa, Artificial Sequence; identical to SEQ ID NO: 1876
  Synthetic polypeptide

SEQ ID NO: 16905 - protein, 613 aa, Artificial Sequence; identical to SEQ ID NO: 1890
  Synthetic polypeptide

SEQ ID NO: 16906 - protein, 566 aa, Artificial Sequence; identical to SEQ ID NO: 1919
  Synthetic polypeptide

SEQ ID NO: 16907 - protein, 624 aa, Artificial Sequence; identical to SEQ ID NO: 1882
  Synthetic polypeptide

SEQ ID NO: 16908 - protein, 287 aa, Artificial Sequence; identical to SEQ ID NO: 2537
  Synthetic polypeptide

SEQ ID NO: 16909 - protein, 44 aa, Artificial Sequence
  Synthetic polypeptide
ARHGGSCLQSQHFGRPRWADHEVRRSRPSWLTRCGRMSAEPKAL

SEQ ID NO: 16910 - protein, 262 aa, Artificial Sequence
  Synthetic polypeptide
HDVDECQQNPRLCKSYGTCVNTLGSYTCQCLPGFKLKPEDPKLCTDVDECSSGQHQCDSSTVCFNTVGSYSCRCRPGWKPRHGIPNNQKDTVCEDMTFSTWTPPPGVHSQTLSRFFDKVQDLGRDYKPGLANNTIQSILQALDELLEAPGDLETLPRLQQHCVASHLLDGLEDVLRGLSKNLSNGLLNFSYPAGTELSLEVQKQVDRSVTLRQNQAVMQLDWNQAQKSGDPGGGSRADCHHLHGAERLSAVPPPGGPHFSPV

SEQ ID NO: 16911 - protein, 657 aa, Artificial Sequence
  Synthetic polypeptide
HDVDECQQNPRLCKSYGTCVNTLGSYTCQCLPGFKLKPEDPKLCTDVDECSSGQHQCDSSTVCFNTVGSYSCRCRPGWKPRHGIPNNQKDTVCEDMTFSTWTPPPGVHSQTLSRFFDKVQDLGRDYKPGLANNTIQSILQALDELLEAPGDLETLPRLQQHCVASHLLDGLEDVLRGLSKNLSNGLLNFSYPAGTELSLEVQKQVDRSVTLRQNQAVMQLDWNQAQKSGDPGPSVVGLVSIPGMGKLLAEAPLVLEPEKQMLLHETHQGLLQDGSPILLSDVISAFLSNNDTQNLSSPVTFTFSHRSVIPRQKVLCVFWEHGQNGCGHWATTGCSTIGTRDTSTICRCTHLSSFAVLMAHYDVQEEDPVLTVITYMGLSVSLLCLLLAALTFLLCKAIQNTSTSLHLQLSLCLFLAHLLFLVAIDQTGHKVLCSIIAGTLHYLYLATLTWMLLEALYLFLTARNLTVVNYSSINRFMKKLMFPVGYGVPAVTVAISAASRPHLYGTPSRCWLQPEKGFIWGFLGPVCAIFSVNLVLFLVTLWILKNRLSSLNSEVSTLRNTRMLAFKATAQLFILGCTWCLGILQVGPAARVMAYLFTIINSLQGVFIFLVYCLLSQQVREQYGKWSKGIRKLKTESEMHTLSSSAKADTSKPSTVN

SEQ ID NO: 16912 - protein, 320 aa, Artificial Sequence
  Synthetic polypeptide
HDVDECQQNPRLCKSYGTCVNTLGSYTCQCLPGFKLKPEDPKLCTDVDECSSGQHQCDSSTVCFNTVGSYSCRCRPGWKPRHGIPNNQKDTVCEDMTFSTWTPPPGVHSQTLSRFFDKVQDLGRDYKPGLANNTIQSILQALDELLEAPGDLETLPRLQQHCVASHLLDGLEDVLRGLSKNLSNGLLNFSYPAGTELSLEVQKQVDRSVTLRQNQAVMQLDWNQAQKSGDPVSDPETEGALCLLGAWPEWMWSLGHHRLQHNRHQRHQHHLPLHPPEQLCRPHGPLRCAGGGSRADCHHLHGAERLSAVPPPGGPHFSPV

SEQ ID NO: 16913 - protein, 714 aa, Artificial Sequence
  Synthetic polypeptide
HDVDECQQNPRLCKSYGTCVNTLGSYTCQCLPGFKLKPEDPKLCTDVNECTSGQNPCHSSTHCLNNVGSYQCRCRPGWQPIPGSPNGPNNTVCEDVDECSSGQHQCDSSTVCFNTVGSYSCRCRPGWKPRHGIPNNQKDTVCEDMTFSTWTPPPGVHSQTLSRFFDKVQDLGRDYKPGLANNTIQSILQALDELLEAPGDLETLPRLQQHCVASHLLDGLEDVLRGLSKNLSNGLLNFSYPAGTELSLEVQKQVDRSVTLRQNQAVMQLDWNQAQKSGDPGMGKLLAEAPLVLEPEKQMLLHETHQGLLQDGSPILLSDVISAFLSNNDTQNLSSPVTFTFSHRSVIPRQKVLCVFWEHGQNGCGHWATTGCSTIGTRDTSTICRCTHLSSFAVLMAHYDVQEEDPVLTVITYMGLSVSLLCLLLAALTFLLCKAIQNTSTSLHLQLSLCLFLAHLLFLVAIDQTGHKVLCSIIAGTLHYLYLATLTWMLLEALYLFLTARNLTVVNYSSINRFMKKLMFPVGYGVPAVTVAISAASRPHLYGTPSRCWLQPEKGFIWGFLGPVCAIFSVNLVLFLVTLWILKNRLSSLNSEVSTLRNTRMLAFKATAQLFILGCTWCLGILQVGPAARVMAYLFTIINSLQGVFIFLVYCLLSQQVREQYGKWSKGIRKLKTESEMHTLSSSAKADTSKPSTPGTVVQACNASTLGGQSRKIT

SEQ ID NO: 16914 - protein, 695 aa, Artificial Sequence
  Synthetic polypeptide
HDVDECQQNPRLCKSYGTCVNTLGSYTCQCLPGFKLKPEDPKLCTDVNECTSGQNPCHSSTHCLNNVGSYQCRCRPGWQPIPGSPNGPNNTVCEDVDECSSGQHQCDSSTVCFNTVGSYSCRCRPGWKPRHGIPNNQKDTVCEDMTFSTWTPPPGVHSQTLSRFFDKVQDLGRDYKPGLANNTIQSILQALDELLEAPGDLETLPRLQQHCVASHLLDGLEDVLRGLSKNLSNGLLNFSYPAGTELSLEVQKQVDRSVTLRQNQAVMQLDWNQAQKSGDPGMGKLLAEAPLVLEPEKQMLLHETHQGLLQDGSPILLSDVISAFLSNNDTQNLSSPVTFTFSHRSVIPRQKVLCVFWEHGQNGCGHWATTGCSTIGTRDTSTICRCTHLSSFAVLMAHYDVQEEDPVLTVITYMGLSVSLLCLLLAALTFLLCKAIQNTSTSLHLQLSLCLFLAHLLFLVAIDQTGHKVLCSIIAGTLHYLYLATLTWMLLEALYLFLTARNLTVVNYSSINRFMKKLMFPVGYGVPAVTVAISAASRPHLYGTPSRCWLQPEKGFIWGFLGPVCAIFSVNLVLFLVTLWILKNRLSSLNSEVSTLRNTRMLAFKATAQLFILGCTWCLGILQVGPAARVMAYLFTIINSLQGVFIFLVYCLLSQQVREQYGKWSKGIRKLKTESEMHTLSSSAKADTSKPSTVN

SEQ ID NO: 16915 - protein, 648 aa, Artificial Sequence
  Synthetic polypeptide
HDVDECQQNPRLCKSYGTCVNTLGSYTCQCLPGFKLKPEDPKLCTDVNECTSGQNPCHSSTHCLNNVGSYQCRCRPGWQPIPGSPNGPNNTVCEDVDECSSGQHQCDSSTVCFNTVGSYSCRCRPGWKPRHGIPNNQKDTVCEDMTFSTWTPPPGVHSQTLSRFFDKVQDLGRDYKPGLANNTIQSILQALDELLEAPGDLETLPRLQQHCVASHLLDGLEDVLRGLSKNLSNGLLNFSYPAGTELSLEVQKQVDRSVTLRQNQAVMQLDWNQAQKSGDPGPSVVGLVSIPGMGKLLAEAPLVLEPEKQMLLHETHQGLLQDGSPILLSDVISAFLSNNDTQNLSSPVTFTFSHREEDPVLTVITYMGLSVSLLCLLLAALTFLLCKAIQNTSTSLHLQLSLCLFLAHLLFLVAIDQTGHKVLCSIIAGTLHYLYLATLTWMLLEALYLFLTARNLTVVNYSSINRFMKKLMFPVGYGVPAVTVAISAASRPHLYGTPSRCWLQPEKGFIWGFLGPVCAIFSVNLVLFLVTLWILKNRLSSLNSEVSTLRNTRMLAFKATAQLFILGCTWCLGILQVGPAARVMAYLFTIINSLQGVFIFLVYCLLSQQVREQYGKWSKGIRKLKTESEMHTLSSSAKADTSKPSTVN

SEQ ID NO: 16916 - protein, 706 aa, Artificial Sequence
  Synthetic polypeptide
HDVDECQQNPRLCKSYGTCVNTLGSYTCQCLPGFKLKPEDPKLCTDVNECTSGQNPCHSSTHCLNNVGSYQCRCRPGWQPIPGSPNGPNNTVCEDVDECSSGQHQCDSSTVCFNTVGSYSCRCRPGWKPRHGIPNNQKDTVCEDMTFSTWTPPPGVHSQTLSRFFDKVQDLGRDYKPGLANNTIQSILQALDELLEAPGDLETLPRLQQHCVASHLLDGLEDVLRGLSKNLSNGLLNFSYPAGTELSLEVQKQVDRSVTLRQNQAVMQLDWNQAQKSGDPGPSVVGLVSIPGMGKLLAEAPLVLEPEKQMLLHETHQGLLQDGSPILLSDVISAFLSNNDTQNLSSPVTFTFSHRSVIPRQKVLCVFWEHGQNGCGHWATTGCSTIGTRDTSTICRCTHLSSFAVLMAHYDVQEEDPVLTVITYMGLSVSLLCLLLAALTFLLCKAIQNTSTSLHLQLSLCLFLAHLLFLVAIDQTGHKVLCSIIAGTLHYLYLATLTWMLLEALYLFLTARNLTVVNYSSINRFMKKLMFPVGYGVPAVTVAISAASRPHLYGTPSRCWLQPEKGFIWGFLGPVCAIFSVNLVLFLVTLWILKNRLSSLNSEVSTLRNTRMLAFKATAQLFILGCTWCLGILQVGPAARVMAYLFTIINSLQGVFIFLVYCLLSQQVREQYGKWSKGIRKLKTESEMHTLSSSAKADTSKPSTVN

SEQ ID NO: 16917 - protein, 58 aa, Artificial Sequence
  Synthetic polypeptide
SRGQEIKTILANTMWTNVSRTQGSVKATAPASTPSAATRASACLASSSNLRTRSSAQM

SEQ ID NO: 16918 - protein, 107 aa, Artificial Sequence
  Synthetic polypeptide
SRGQEIKTILANTMWTNVSRTQGSVKATAPASTPSAATRASACLASSSNLRTRSSAQMWTSAAPGSISVTAPPSASTPWVHTAAAAAQAGSPDTESRITKRTLSVKI

SEQ ID NO: 16919 - protein, 28 aa, Artificial Sequence
  Synthetic polypeptide
ARHGGSCLQSQHFGRPRCGRMSAEPKAL

SEQ ID NO: 16920 - protein, 62 aa, Artificial Sequence
  Synthetic polypeptide
GQAWWLMPAIPALWEAEMWTNVSRTQGSVKATAPASTPSAATRASACLASSSNLRTRSSAQM

SEQ ID NO: 16921 - protein, 111 aa, Artificial Sequence
  Synthetic polypeptide
GQAWWLMPAIPALWEAEMWTNVSRTQGSVKATAPASTPSAATRASACLASSSNLRTRSSAQMWTSAAPGSISVTAPPSASTPWVHTAAAAAQAGSPDTESRITKRTLSVKI

SEQ ID NO: 16922 - protein, 277 aa, Artificial Sequence
  Synthetic polypeptide
PGMVAHACNPSTLGGRDVDECQQNPRLCKSYGTCVNTLGSYTCQCLPGFKLKPEDPKLCTDVDECSSGQHQCDSSTVCFNTVGSYSCRCRPGWKPRHGIPNNQKDTVCEDMTFSTWTPPPGVHSQTLSRFFDKVQDLGRDYKPGLANNTIQSILQALDELLEAPGDLETLPRLQQHCVASHLLDGLEDVLRGLSKNLSNGLLNFSYPAGTELSLEVQKQVDRSVTLRQNQAVMQLDWNQAQKSGDPGGGSRADCHHLHGAERLSAVPPPGGPHFSPV

SEQ ID NO: 16923 - protein, 672 aa, Artificial Sequence
  Synthetic polypeptide
PGMVAHACNPSTLGGRDVDECQQNPRLCKSYGTCVNTLGSYTCQCLPGFKLKPEDPKLCTDVDECSSGQHQCDSSTVCFNTVGSYSCRCRPGWKPRHGIPNNQKDTVCEDMTFSTWTPPPGVHSQTLSRFFDKVQDLGRDYKPGLANNTIQSILQALDELLEAPGDLETLPRLQQHCVASHLLDGLEDVLRGLSKNLSNGLLNFSYPAGTELSLEVQKQVDRSVTLRQNQAVMQLDWNQAQKSGDPGPSVVGLVSIPGMGKLLAEAPLVLEPEKQMLLHETHQGLLQDGSPILLSDVISAFLSNNDTQNLSSPVTFTFSHRSVIPRQKVLCVFWEHGQNGCGHWATTGCSTIGTRDTSTICRCTHLSSFAVLMAHYDVQEEDPVLTVITYMGLSVSLLCLLLAALTFLLCKAIQNTSTSLHLQLSLCLFLAHLLFLVAIDQTGHKVLCSIIAGTLHYLYLATLTWMLLEALYLFLTARNLTVVNYSSINRFMKKLMFPVGYGVPAVTVAISAASRPHLYGTPSRCWLQPEKGFIWGFLGPVCAIFSVNLVLFLVTLWILKNRLSSLNSEVSTLRNTRMLAFKATAQLFILGCTWCLGILQVGPAARVMAYLFTIINSLQGVFIFLVYCLLSQQVREQYGKWSKGIRKLKTESEMHTLSSSAKADTSKPSTVN

SEQ ID NO: 16924 - protein, 335 aa, Artificial Sequence
  Synthetic polypeptide
PGMVAHACNPSTLGGRDVDECQQNPRLCKSYGTCVNTLGSYTCQCLPGFKLKPEDPKLCTDVDECSSGQHQCDSSTVCFNTVGSYSCRCRPGWKPRHGIPNNQKDTVCEDMTFSTWTPPPGVHSQTLSRFFDKVQDLGRDYKPGLANNTIQSILQALDELLEAPGDLETLPRLQQHCVASHLLDGLEDVLRGLSKNLSNGLLNFSYPAGTELSLEVQKQVDRSVTLRQNQAVMQLDWNQAQKSGDPVSDPETEGALCLLGAWPEWMWSLGHHRLQHNRHQRHQHHLPLHPPEQLCRPHGPLRCAGGGSRADCHHLHGAERLSAVPPPGGPHFSPV

SEQ ID NO: 16925 - protein, 729 aa, Artificial Sequence
  Synthetic polypeptide
PGMVAHACNPSTLGGRDVDECQQNPRLCKSYGTCVNTLGSYTCQCLPGFKLKPEDPKLCTDVNECTSGQNPCHSSTHCLNNVGSYQCRCRPGWQPIPGSPNGPNNTVCEDVDECSSGQHQCDSSTVCFNTVGSYSCRCRPGWKPRHGIPNNQKDTVCEDMTFSTWTPPPGVHSQTLSRFFDKVQDLGRDYKPGLANNTIQSILQALDELLEAPGDLETLPRLQQHCVASHLLDGLEDVLRGLSKNLSNGLLNFSYPAGTELSLEVQKQVDRSVTLRQNQAVMQLDWNQAQKSGDPGMGKLLAEAPLVLEPEKQMLLHETHQGLLQDGSPILLSDVISAFLSNNDTQNLSSPVTFTFSHRSVIPRQKVLCVFWEHGQNGCGHWATTGCSTIGTRDTSTICRCTHLSSFAVLMAHYDVQEEDPVLTVITYMGLSVSLLCLLLAALTFLLCKAIQNTSTSLHLQLSLCLFLAHLLFLVAIDQTGHKVLCSIIAGTLHYLYLATLTWMLLEALYLFLTARNLTVVNYSSINRFMKKLMFPVGYGVPAVTVAISAASRPHLYGTPSRCWLQPEKGFIWGFLGPVCAIFSVNLVLFLVTLWILKNRLSSLNSEVSTLRNTRMLAFKATAQLFILGCTWCLGILQVGPAARVMAYLFTIINSLQGVFIFLVYCLLSQQVREQYGKWSKGIRKLKTESEMHTLSSSAKADTSKPSTPGTVVQACNASTLGGQSRKIT

SEQ ID NO: 16926 - protein, 710 aa, Artificial Sequence
  Synthetic polypeptide
PGMVAHACNPSTLGGRDVDECQQNPRLCKSYGTCVNTLGSYTCQCLPGFKLKPEDPKLCTDVNECTSGQNPCHSSTHCLNNVGSYQCRCRPGWQPIPGSPNGPNNTVCEDVDECSSGQHQCDSSTVCFNTVGSYSCRCRPGWKPRHGIPNNQKDTVCEDMTFSTWTPPPGVHSQTLSRFFDKVQDLGRDYKPGLANNTIQSILQALDELLEAPGDLETLPRLQQHCVASHLLDGLEDVLRGLSKNLSNGLLNFSYPAGTELSLEVQKQVDRSVTLRQNQAVMQLDWNQAQKSGDPGMGKLLAEAPLVLEPEKQMLLHETHQGLLQDGSPILLSDVISAFLSNNDTQNLSSPVTFTFSHRSVIPRQKVLCVFWEHGQNGCGHWATTGCSTIGTRDTSTICRCTHLSSFAVLMAHYDVQEEDPVLTVITYMGLSVSLLCLLLAALTFLLCKAIQNTSTSLHLQLSLCLFLAHLLFLVAIDQTGHKVLCSIIAGTLHYLYLATLTWMLLEALYLFLTARNLTVVNYSSINRFMKKLMFPVGYGVPAVTVAISAASRPHLYGTPSRCWLQPEKGFIWGFLGPVCAIFSVNLVLFLVTLWILKNRLSSLNSEVSTLRNTRMLAFKATAQLFILGCTWCLGILQVGPAARVMAYLFTIINSLQGVFIFLVYCLLSQQVREQYGKWSKGIRKLKTESEMHTLSSSAKADTSKPSTVN

SEQ ID NO: 16927 - protein, 663 aa, Artificial Sequence
  Synthetic polypeptide
PGMVAHACNPSTLGGRDVDECQQNPRLCKSYGTCVNTLGSYTCQCLPGFKLKPEDPKLCTDVNECTSGQNPCHSSTHCLNNVGSYQCRCRPGWQPIPGSPNGPNNTVCEDVDECSSGQHQCDSSTVCFNTVGSYSCRCRPGWKPRHGIPNNQKDTVCEDMTFSTWTPPPGVHSQTLSRFFDKVQDLGRDYKPGLANNTIQSILQALDELLEAPGDLETLPRLQQHCVASHLLDGLEDVLRGLSKNLSNGLLNFSYPAGTELSLEVQKQVDRSVTLRQNQAVMQLDWNQAQKSGDPGPSVVGLVSIPGMGKLLAEAPLVLEPEKQMLLHETHQGLLQDGSPILLSDVISAFLSNNDTQNLSSPVTFTFSHREEDPVLTVITYMGLSVSLLCLLLAALTFLLCKAIQNTSTSLHLQLSLCLFLAHLLFLVAIDQTGHKVLCSIIAGTLHYLYLATLTWMLLEALYLFLTARNLTVVNYSSINRFMKKLMFPVGYGVPAVTVAISAASRPHLYGTPSRCWLQPEKGFIWGFLGPVCAIFSVNLVLFLVTLWILKNRLSSLNSEVSTLRNTRMLAFKATAQLFILGCTWCLGILQVGPAARVMAYLFTIINSLQGVFIFLVYCLLSQQVREQYGKWSKGIRKLKTESEMHTLSSSAKADTSKPSTVN

SEQ ID NO: 16928 - protein, 721 aa, Artificial Sequence
  Synthetic polypeptide
PGMVAHACNPSTLGGRDVDECQQNPRLCKSYGTCVNTLGSYTCQCLPGFKLKPEDPKLCTDVNECTSGQNPCHSSTHCLNNVGSYQCRCRPGWQPIPGSPNGPNNTVCEDVDECSSGQHQCDSSTVCFNTVGSYSCRCRPGWKPRHGIPNNQKDTVCEDMTFSTWTPPPGVHSQTLSRFFDKVQDLGRDYKPGLANNTIQSILQALDELLEAPGDLETLPRLQQHCVASHLLDGLEDVLRGLSKNLSNGLLNFSYPAGTELSLEVQKQVDRSVTLRQNQAVMQLDWNQAQKSGDPGPSVVGLVSIPGMGKLLAEAPLVLEPEKQMLLHETHQGLLQDGSPILLSDVISAFLSNNDTQNLSSPVTFTFSHRSVIPRQKVLCVFWEHGQNGCGHWATTGCSTIGTRDTSTICRCTHLSSFAVLMAHYDVQEEDPVLTVITYMGLSVSLLCLLLAALTFLLCKAIQNTSTSLHLQLSLCLFLAHLLFLVAIDQTGHKVLCSIIAGTLHYLYLATLTWMLLEALYLFLTARNLTVVNYSSINRFMKKLMFPVGYGVPAVTVAISAASRPHLYGTPSRCWLQPEKGFIWGFLGPVCAIFSVNLVLFLVTLWILKNRLSSLNSEVSTLRNTRMLAFKATAQLFILGCTWCLGILQVGPAARVMAYLFTIINSLQGVFIFLVYCLLSQQVREQYGKWSKGIRKLKTESEMHTLSSSAKADTSKPSTVN

SEQ ID NO: 16929 - protein, 272 aa, Artificial Sequence
  Synthetic polypeptide
AADCIWMPSQEDVDECQQNPRLCKSYGTCVNTLGSYTCQCLPGFKLKPEDPKLCTDVDECSSGQHQCDSSTVCFNTVGSYSCRCRPGWKPRHGIPNNQKDTVCEDMTFSTWTPPPGVHSQTLSRFFDKVQDLGRDYKPGLANNTIQSILQALDELLEAPGDLETLPRLQQHCVASHLLDGLEDVLRGLSKNLSNGLLNFSYPAGTELSLEVQKQVDRSVTLRQNQAVMQLDWNQAQKSGDPGGGSRADCHHLHGAERLSAVPPPGGPHFSPV

SEQ ID NO: 16930 - protein, 667 aa, Artificial Sequence
  Synthetic polypeptide
AADCIWMPSQEDVDECQQNPRLCKSYGTCVNTLGSYTCQCLPGFKLKPEDPKLCTDVDECSSGQHQCDSSTVCFNTVGSYSCRCRPGWKPRHGIPNNQKDTVCEDMTFSTWTPPPGVHSQTLSRFFDKVQDLGRDYKPGLANNTIQSILQALDELLEAPGDLETLPRLQQHCVASHLLDGLEDVLRGLSKNLSNGLLNFSYPAGTELSLEVQKQVDRSVTLRQNQAVMQLDWNQAQKSGDPGPSVVGLVSIPGMGKLLAEAPLVLEPEKQMLLHETHQGLLQDGSPILLSDVISAFLSNNDTQNLSSPVTFTFSHRSVIPRQKVLCVFWEHGQNGCGHWATTGCSTIGTRDTSTICRCTHLSSFAVLMAHYDVQEEDPVLTVITYMGLSVSLLCLLLAALTFLLCKAIQNTSTSLHLQLSLCLFLAHLLFLVAIDQTGHKVLCSIIAGTLHYLYLATLTWMLLEALYLFLTARNLTVVNYSSINRFMKKLMFPVGYGVPAVTVAISAASRPHLYGTPSRCWLQPEKGFIWGFLGPVCAIFSVNLVLFLVTLWILKNRLSSLNSEVSTLRNTRMLAFKATAQLFILGCTWCLGILQVGPAARVMAYLFTIINSLQGVFIFLVYCLLSQQVREQYGKWSKGIRKLKTESEMHTLSSSAKADTSKPSTVN

SEQ ID NO: 16931 - protein, 330 aa, Artificial Sequence
  Synthetic polypeptide
AADCIWMPSQEDVDECQQNPRLCKSYGTCVNTLGSYTCQCLPGFKLKPEDPKLCTDVDECSSGQHQCDSSTVCFNTVGSYSCRCRPGWKPRHGIPNNQKDTVCEDMTFSTWTPPPGVHSQTLSRFFDKVQDLGRDYKPGLANNTIQSILQALDELLEAPGDLETLPRLQQHCVASHLLDGLEDVLRGLSKNLSNGLLNFSYPAGTELSLEVQKQVDRSVTLRQNQAVMQLDWNQAQKSGDPVSDPETEGALCLLGAWPEWMWSLGHHRLQHNRHQRHQHHLPLHPPEQLCRPHGPLRCAGGGSRADCHHLHGAERLSAVPPPGGPHFSPV

SEQ ID NO: 16932 - protein, 724 aa, Artificial Sequence
  Synthetic polypeptide
AADCIWMPSQEDVDECQQNPRLCKSYGTCVNTLGSYTCQCLPGFKLKPEDPKLCTDVNECTSGQNPCHSSTHCLNNVGSYQCRCRPGWQPIPGSPNGPNNTVCEDVDECSSGQHQCDSSTVCFNTVGSYSCRCRPGWKPRHGIPNNQKDTVCEDMTFSTWTPPPGVHSQTLSRFFDKVQDLGRDYKPGLANNTIQSILQALDELLEAPGDLETLPRLQQHCVASHLLDGLEDVLRGLSKNLSNGLLNFSYPAGTELSLEVQKQVDRSVTLRQNQAVMQLDWNQAQKSGDPGMGKLLAEAPLVLEPEKQMLLHETHQGLLQDGSPILLSDVISAFLSNNDTQNLSSPVTFTFSHRSVIPRQKVLCVFWEHGQNGCGHWATTGCSTIGTRDTSTICRCTHLSSFAVLMAHYDVQEEDPVLTVITYMGLSVSLLCLLLAALTFLLCKAIQNTSTSLHLQLSLCLFLAHLLFLVAIDQTGHKVLCSIIAGTLHYLYLATLTWMLLEALYLFLTARNLTVVNYSSINRFMKKLMFPVGYGVPAVTVAISAASRPHLYGTPSRCWLQPEKGFIWGFLGPVCAIFSVNLVLFLVTLWILKNRLSSLNSEVSTLRNTRMLAFKATAQLFILGCTWCLGILQVGPAARVMAYLFTIINSLQGVFIFLVYCLLSQQVREQYGKWSKGIRKLKTESEMHTLSSSAKADTSKPSTPGTVVQACNASTLGGQSRKIT

SEQ ID NO: 16933 - protein, 705 aa, Artificial Sequence
  Synthetic polypeptide
AADCIWMPSQEDVDECQQNPRLCKSYGTCVNTLGSYTCQCLPGFKLKPEDPKLCTDVNECTSGQNPCHSSTHCLNNVGSYQCRCRPGWQPIPGSPNGPNNTVCEDVDECSSGQHQCDSSTVCFNTVGSYSCRCRPGWKPRHGIPNNQKDTVCEDMTFSTWTPPPGVHSQTLSRFFDKVQDLGRDYKPGLANNTIQSILQALDELLEAPGDLETLPRLQQHCVASHLLDGLEDVLRGLSKNLSNGLLNFSYPAGTELSLEVQKQVDRSVTLRQNQAVMQLDWNQAQKSGDPGMGKLLAEAPLVLEPEKQMLLHETHQGLLQDGSPILLSDVISAFLSNNDTQNLSSPVTFTFSHRSVIPRQKVLCVFWEHGQNGCGHWATTGCSTIGTRDTSTICRCTHLSSFAVLMAHYDVQEEDPVLTVITYMGLSVSLLCLLLAALTFLLCKAIQNTSTSLHLQLSLCLFLAHLLFLVAIDQTGHKVLCSIIAGTLHYLYLATLTWMLLEALYLFLTARNLTVVNYSSINRFMKKLMFPVGYGVPAVTVAISAASRPHLYGTPSRCWLQPEKGFIWGFLGPVCAIFSVNLVLFLVTLWILKNRLSSLNSEVSTLRNTRMLAFKATAQLFILGCTWCLGILQVGPAARVMAYLFTIINSLQGVFIFLVYCLLSQQVREQYGKWSKGIRKLKTESEMHTLSSSAKADTSKPSTVN

SEQ ID NO: 16934 - protein, 658 aa, Artificial Sequence
  Synthetic polypeptide
AADCIWMPSQEDVDECQQNPRLCKSYGTCVNTLGSYTCQCLPGFKLKPEDPKLCTDVNECTSGQNPCHSSTHCLNNVGSYQCRCRPGWQPIPGSPNGPNNTVCEDVDECSSGQHQCDSSTVCFNTVGSYSCRCRPGWKPRHGIPNNQKDTVCEDMTFSTWTPPPGVHSQTLSRFFDKVQDLGRDYKPGLANNTIQSILQALDELLEAPGDLETLPRLQQHCVASHLLDGLEDVLRGLSKNLSNGLLNFSYPAGTELSLEVQKQVDRSVTLRQNQAVMQLDWNQAQKSGDPGPSVVGLVSIPGMGKLLAEAPLVLEPEKQMLLHETHQGLLQDGSPILLSDVISAFLSNNDTQNLSSPVTFTFSHREEDPVLTVITYMGLSVSLLCLLLAALTFLLCKAIQNTSTSLHLQLSLCLFLAHLLFLVAIDQTGHKVLCSIIAGTLHYLYLATLTWMLLEALYLFLTARNLTVVNYSSINRFMKKLMFPVGYGVPAVTVAISAASRPHLYGTPSRCWLQPEKGFIWGFLGPVCAIFSVNLVLFLVTLWILKNRLSSLNSEVSTLRNTRMLAFKATAQLFILGCTWCLGILQVGPAARVMAYLFTIINSLQGVFIFLVYCLLSQQVREQYGKWSKGIRKLKTESEMHTLSSSAKADTSKPSTVN

SEQ ID NO: 16935 - protein, 716 aa, Artificial Sequence
  Synthetic polypeptide
AADCIWMPSQEDVDECQQNPRLCKSYGTCVNTLGSYTCQCLPGFKLKPEDPKLCTDVNECTSGQNPCHSSTHCLNNVGSYQCRCRPGWQPIPGSPNGPNNTVCEDVDECSSGQHQCDSSTVCFNTVGSYSCRCRPGWKPRHGIPNNQKDTVCEDMTFSTWTPPPGVHSQTLSRFFDKVQDLGRDYKPGLANNTIQSILQALDELLEAPGDLETLPRLQQHCVASHLLDGLEDVLRGLSKNLSNGLLNFSYPAGTELSLEVQKQVDRSVTLRQNQAVMQLDWNQAQKSGDPGPSVVGLVSIPGMGKLLAEAPLVLEPEKQMLLHETHQGLLQDGSPILLSDVISAFLSNNDTQNLSSPVTFTFSHRSVIPRQKVLCVFWEHGQNGCGHWATTGCSTIGTRDTSTICRCTHLSSFAVLMAHYDVQEEDPVLTVITYMGLSVSLLCLLLAALTFLLCKAIQNTSTSLHLQLSLCLFLAHLLFLVAIDQTGHKVLCSIIAGTLHYLYLATLTWMLLEALYLFLTARNLTVVNYSSINRFMKKLMFPVGYGVPAVTVAISAASRPHLYGTPSRCWLQPEKGFIWGFLGPVCAIFSVNLVLFLVTLWILKNRLSSLNSEVSTLRNTRMLAFKATAQLFILGCTWCLGILQVGPAARVMAYLFTIINSLQGVFIFLVYCLLSQQVREQYGKWSKGIRKLKTESEMHTLSSSAKADTSKPSTVN

SEQ ID NO: 16936 - protein, 65 aa, Artificial Sequence
  Synthetic polypeptide
HDHHVQLHRLLTAYGCPAKRMWTNVSRTQGSVKATAPASTPSAATRASACLASSSNLRTRSSAQM

SEQ ID NO: 16937 - protein, 114 aa, Artificial Sequence
  Synthetic polypeptide
HDHHVQLHRLLTAYGCPAKRMWTNVSRTQGSVKATAPASTPSAATRASACLASSSNLRTRSSAQMWTSAAPGSISVTAPPSASTPWVHTAAAAAQAGSPDTESRITKRTLSVKI

SEQ ID NO: 16938 - protein, 20 aa, Artificial Sequence
  Synthetic polypeptide
LHMDAQPRGCGRMSAEPKAL

SEQ ID NO: 16939 - protein, 25 aa, Artificial Sequence
  Synthetic polypeptide
AKIVPLHSSLGDRARLHLKKKKRKN

SEQ ID NO: 16940 - protein, 238 aa, Artificial Sequence
  Synthetic polypeptide
DQPGQHGETPSLLKTQKLAGHCGRHLWSQLLGRLRQENHLNLGDRGCSEPRLCHCTPAWATERDSISKKKKERIDFKIRTIELDGKRIKLQIWDTAGQERFRTITTAYYRGAMGIMLVYDITNEKSFDNIRNWIRNIEEHASADVEKMILGNKCDVNDKRQVSKERGEKLALDYGIKFMETSAKANINVENAFFTLARDIKAKMDKKLEGNSPQGSNQGVKITPDQQKRSSFFRCVLL

SEQ ID NO: 16941 - protein, 238 aa, Artificial Sequence
  Synthetic polypeptide
DQPGQHGETPSLLKTQKLAGHCGRHLWSQLLGRLRQENHLNLGDRGCSEPRLCHCTPAWATERDSISKKKKERIDFKIRTIELDGKRIKLQIWDTAGQERFRTITTAYYRGAMGIMLVYDITNEKSFDNIRNWIRNIEEHASADVEKMILGNKCDVNDKRQVSKERGEKLALDYGIKFMETSAKANINVENRYQSKNGQKIGRQQPPGEQPGSQNHTGPAEEEQLFPMCSSVRNTALL

SEQ ID NO: 16942 - protein, 40 aa, Artificial Sequence
  Synthetic polypeptide
TWETEAAVSQDCATALQPGRQSETPSQKKKKKELTLKLGP

SEQ ID NO: 16943 - protein, 40 aa, Artificial Sequence
  Synthetic polypeptide
PGAVADACNPSTLGGRGHHAGLRHHQREVLRQHPELDSQH

SEQ ID NO: 16944 - protein, 141 aa, Artificial Sequence
  Synthetic polypeptide
QAQWLMPVIPALWEAEGIMLVYDITNEKSFDNIRNWIRNIEEHASADVEKMILGNKCDVNDKRQVSKERGEKLALDYGIKFMETSAKANINVENAFFTLARDIKAKMDKKLEGNSPQGSNQGVKITPDQQKRSSFFRCVLL

SEQ ID NO: 16945 - protein, 141 aa, Artificial Sequence
  Synthetic polypeptide
QAQWLMPVIPALWEAEGIMLVYDITNEKSFDNIRNWIRNIEEHASADVEKMILGNKCDVNDKRQVSKERGEKLALDYGIKFMETSAKANINVENRYQSKNGQKIGRQQPPGEQPGSQNHTGPAEEEQLFPMCSSVRNTALL

SEQ ID NO: 16946 - protein, 42 aa, Artificial Sequence
  Synthetic polypeptide
SQHFGRPRASCWSTTSPTRSPSTTSGTGFATLRSTPLQTSKR

SEQ ID NO: 16947 - protein, 2 aa, Artificial Sequence
  Synthetic polypeptide
AR

SEQ ID NO: 16948 - protein, 7 aa, Artificial Sequence
  Synthetic polypeptide
GQVKVHL

SEQ ID NO: 16949 - protein, 7 aa, Artificial Sequence
  Synthetic polypeptide
PGKSTPV

SEQ ID NO: 16950 - protein, 118 aa, Artificial Sequence
  Synthetic polypeptide
PGKSTPVSQLGSADFPEAPDPFQPLGADSGDPFQSKKGFGDPFSGKDPFVPSSAAKPSKASASGFADFTSFGNEEQQLAWAKRESEKAEQERLARLRRQEQEDLELAIALSKADMPAA

SEQ ID NO: 16951 - protein, 72 aa, Artificial Sequence
  Synthetic polypeptide
PGKSTPVSQLGSADFPEAPDPFQPLGADSGDPFQSKKGFGDPFSGKDPFVPSSAAKPSKASASGFADFTSVS

SEQ ID NO: 16952 - protein, 9 aa, Artificial Sequence
  Synthetic polypeptide
SLSRRPVPE

SEQ ID NO: 16953 - protein, 100 aa, Artificial Sequence
  Synthetic polypeptide
TLQYFSFLIPQQATRSRMTPLQNSRQLQQIHLEGTLSKKVTHSVALPLTTSSRNRQRMTHLPRIHSRKTLPYLRSSTPLNPVIPFHPPVSPQKDQIPLEP

SEQ ID NO: 16954 - protein, 129 aa, Artificial Sequence
  Synthetic polypeptide
WPAPLNPSVLQFPNPSAGDPFQNDPFAEQQTTSTDPFGGDPFKESDPFRGSATDDFFKKQTKNDPFTSDPFTKNPSLPSKLDPFESSDPFSSSSVSSKGSDPFGTLDPFGSGSFNSAEGFADFSQMSKE

SEQ ID NO: 16955 - protein, 289 aa, Artificial Sequence
  Synthetic polypeptide
WPAPLNPSVLQFPNPSAGDPFQNDPFAEQQTTSTDPFGGDPFKESDPFRGSATDDFFKKQTKNDPFTSDPFTKNPSLPSKLDPFESSDPFSSSSVSSKGSDPFGTLDPFGSGSFNSAEGFADFSQMSKPPPSGPFTSSLGGAGFSDDPFKSKQDTPALPPKKPAPPRPKPPSGKSTPVSQLGSADFPEAPDPFQPLGADSGDPFQSKKGFGDPFSGKDPFVPSSAAKPSKASASGFADFTSFGNEEQQLAWAKRESEKAEQERLARLRRQEQEDLELAIALSKADMPAA

SEQ ID NO: 16956 - protein, 243 aa, Artificial Sequence
  Synthetic polypeptide
WPAPLNPSVLQFPNPSAGDPFQNDPFAEQQTTSTDPFGGDPFKESDPFRGSATDDFFKKQTKNDPFTSDPFTKNPSLPSKLDPFESSDPFSSSSVSSKGSDPFGTLDPFGSGSFNSAEGFADFSQMSKPPPSGPFTSSLGGAGFSDDPFKSKQDTPALPPKKPAPPRPKPPSGKSTPVSQLGSADFPEAPDPFQPLGADSGDPFQSKKGFGDPFSGKDPFVPSSAAKPSKASASGFADFTSVS

SEQ ID NO: 16957 - protein, 133 aa, Artificial Sequence
  Synthetic polypeptide
WPAPLNPSVLQFPNPSAGDPFQNDPFAEQQTTSTDPFGGDPFKESDPFRGSATDDFFKKQTKNDPFTSDPFTKNPSLPSKLDPFESSDPFSSSSVSSKGSDPFGTLDPFGSGSFNSAEGFADFSQMSKVKVHL

SEQ ID NO: 16958 - protein, 17 aa, Artificial Sequence
  Synthetic polypeptide
GGRSPPGVHLQRILLSQ

SEQ ID NO: 16959 - protein, 977 aa, Artificial Sequence
  Synthetic polypeptide
GWARCLMPVIPALSEAEAGGSLEAEGVPRAYTYSAFFCPSERVHISTPNKYEFQYVQRPLRLTRFDVAVRAHNDARVALSSGPQDTAGMIEIVLGGHQNTRSWISTSKMGEPVASAHTAKILSWDEFRTFWISWRGGLIQVGHGPEPSNESVIVAWTLPRPPEVQFIGFSTGWGSMGEFRIWRKMEVDESYSEAFTLGVPHGAIPGSERATASIIGDVMGPTLNHLNNLLRLPFGCGEQNMIHFAPNVFVLKYLQKTQQLSPEVERETTDYLVQGYQRQLTYKRQDGSYSAFGERDASGSMWLTAFVLKSFAQARSFIFVDPRELAAAKSWIIQQQQADGSFLAVGRVLNKDIQGGIHGTVPLTAYVVVALLETGTASEEERGSTDKARHFLESAAPLAMDPYSCALTTYALTLLRSPAAPEALRKLRSLAIMRDGVTHWSLSNSWDVDKGTFLSFSDRVSQSVVSAEVEMTAYALLTYTLLGDVAAALPVVKWLSQQRNALGGFSSTQDTCVALQALAEYAILSYAGGINLTVSLASTNLDYQETFELHRTNQKVLQTAAIPSLPTGLFVSAKGDGCCLMQIDVTYNVPDPVAKPAFQLLVSLQEPEAQGRPPPMPASAAEGSRGDWPPADDDDPAADQHHQEYKVMLEVCTRWLHAGSSNMAVLEVPLLSGFRADIESLEQLLLDKHMGMKRYEVAGRRVLFYFDEIPSRCLTCVRFRALRECVVGRTSALPVSVYDYYEPAFEATRFYNVSTHSPLARELCAGPACNEVERAPARGPGWFPGESGPAVAPEEGAAIARCGCDHDCGAQGNPVCGSDGVVYASACRLREAACRQAAPLEPAPPSCCALEQRLPASSSSTYGDDLASVAPGPLQQDVKLNGAGLEVEDSDPEPEGEAEDRVTAGPRPPVSSGNLESSTQSASPFHRWGQTPAPQRHSGRVVGAHRPGLLSPVFVYSPAFQSGGEEGLWMSNTCTLR

SEQ ID NO: 16960 - protein, 79 aa, Artificial Sequence
  Synthetic polypeptide
SQHFRRPRQADRLRRKESPGRTPTAHSSVPVRESTSPPPTSMSSSMCSGHCASPALMWLCELTMMPVWPCLLGPRTQQA

SEQ ID NO: 16961 - protein, 18 aa, Artificial Sequence
  Synthetic polypeptide
DLPSHVKLCPRASGAKRF

SEQ ID NO: 16962 - protein, 1832 aa, Artificial Sequence
  Synthetic polypeptide
GETPFCLALILSCLPPCKTCLSPFAMIVRPPQPRETVPTGLRGQALLKVWGRGWQAEEGPLFHNQTSVTVDGRGASVFIQTDKPVYRPQHRVLISIFTVSPNLRPVNEKLEAYILDPRGSRMIEWRHLKPFCCGITNMSFPLSDQPVLGEWFIFVEMQGHAYNKSFEVQKYVLPKFELLIDPPRYIQDLDACETGTVRARYTFGKPVAGALMINMTVNGVGYYSHEVGRPVLRTTKILGSRDFDICVRDMIPADVPEHFRGRVSIWAMVTSVDGSQQVAFDDSTPVQRQLVDIRYSKDTRKQFKPGLAYVGKVELSYPDGSPAEGVTVQIKAELTPKDNIYTSEVVSQRGLVGFEIPSIPTSAQHVWLETKVMALNGKPVGAQYLPSYLSLGSWYSPSQCYLQLQPPSHPLQVGEEAYFSVKSTCPCNFTLYYEVAARGNIVLSGQQPAHTTQQRSKRAAPALEKPIRLTHLSETEPPPAPEAEVDVCVTSLHLAVTPSMVPLGRLLVFYVRENGEGVADSLQFAVETFFENQVSVTYSANETQPGEVVDLRIRAARGSCVCVAAVDKSVYLLRSGFRLTPAQVFQELEDYDVSDSFGVSREDGPFWWAGLTAQRRRRSSVFPWPWGITKDSGFAFTETGLVVMTDRVSLNHRQDGGLYTDEAVPAFQPHTGSLVAVAPSRHPPRTEKRKRTFFPETWIWHCLNISDPSGEGTLSVKVPDSITSWVGEAVALSTSQGLGIAEPSLLKTFKPFFVDFMLPALIIRGEQVKIPLSVYNYMGTCAEVYMKLSVPKGIQFVGHPGKRHVTKKMCVAPGEAEPIWVVLSFSDLGLNNITAKALAYGDTNCCRDGRSSKHPEENHADRRVPIGVDHVRRSVMVEAEGVPRAYTYSAFFCPSERVHISTPNKYEFQYVQRPLRLTRFDVAVRAHNDARVALSSGPQDTAGMIEIVLGGHQNTRSWISTSKMGEPVASAHTAKILSWDEFRTFWISWRGGLIQVGHGPEPSNESVIVAWTLPRPPEVQFIGFSTGWGSMGEFRIWRKMEVDESYSEAFTLGVPHGAIPGSERATASIIGDVMGPTLNHLNNLLRLPFGCGEQNMIHFAPNVFVLKYLQKTQQLSPEVERETTDYLVQGYQRQLTYKRQDGSYSAFGERDASGSMWLTAFVLKSFAQARSFIFVDPRELAAAKSWIIQQQQADGSFLAVGRVLNKDIQGGIHGTVPLTAYVVVALLETGTASEEERGSTDKARHFLESAAPLAMDPYSCALTTYALTLLRSPAAPEALRKLRSLAIMRDGVTHWSLSNSWDVDKGTFLSFSDRVSQSVVSAEVEMTAYALLTYTLLGDVAAALPVVKWLSQQRNALGGFSSTQDTCVALQALAEYAILSYAGGINLTVSLASTNLDYQETFELHRTNQKVLQTAAIPSLPTGLFVSAKGDGCCLMQIDVTYNVPDPVAKPAFQLLVSLQEPEAQGRPPPMPASAAEGSRGDWPPADDDDPAADQHHQEYKVMLEVCTRWLHAGSSNMAVLEVPLLSGFRADIESLEQLLLDKHMGMKRYEVAGRRVLFYFDEIPSRCLTCVRFRALRECVVGRTSALPVSVYDYYEPAFEATRFYNVSTHSPLARELCAGPACNEVERAPARGPGWFPGESGPAVAPEEGAAIARCGCDHDCGAQGNPVCGSDGVVYASACRLREAACRQAAPLEPAPPSCCALEQRLPASSSSTYGDDLASVAPGPLQQDVKLNGAGLEVEDSDPEPEGEAEDRVTAGPRPPVSSGNLESSTQSASPFHRWGQTPAPQRHSGRVVGAHRPGLLSPVFVYSPAFQSGGEEGLWMSNTCTLR

SEQ ID NO: 16963 - protein, 450 aa, Artificial Sequence
  Synthetic polypeptide
GETPFCLALILSCLPPCKTCLSPFAMIVRPPQPRETVPTGLRGQALLKVWGRGWQAEEGPLFHNQTSVTVDGRGASVFIQTDKPVYRPQHRVLISIFTVSPNLRPVNEKLEAYILDPRGSRMIEWRHLKPFCCGITNMSFPLSDQPVLGEWFIFVEMQGHAYNKSFEVQKYVLPKFELLIDPPRYIQDLDACETGTVRARYTFGKPVAGALMINMTVNGVGYYSHEVGRPVLRTTKILGSRDFDICVRDMIPADVPEHFRGRVSIWAMVTSVDGSQQVAFDDSTPVQRQLVDIRYSKDTRKQFKPGLAYVGKVELSYPDGSPAEGVTVQIKAELTPKDNIYTSEVVSQRGLVGFEIPSIPTSAQHVWLEVFQELEDYDVSDSFGVSREDGPFWWAGLTAQRRRRSSVFPWPWGITKDSGFAFTVRRGNGTGGDDRPSEPEPPAGRWPLHR

SEQ ID NO: 16964 - protein, 120 aa, Artificial Sequence
  Synthetic polypeptide
NCAHGPPGPSASESVGPRLAGGGGAPLSQPDLGDRGRPGRFCIHPDGQACVQTPAPSAHKHLHRLSKSEACQREAGSLHPGPPRLSDDRVETLKAVLLRHHQHELPLVRPACVGRMVHFC

SEQ ID NO: 16965 - protein, 548 aa, Artificial Sequence
  Synthetic polypeptide
NGDKLFGKRLLQAGRYLVSHKAWMKTVPTENCDVLMTFPDTTDDHTLLWLLNHIRVGIPELIVQVRHHRHTRAYAFFVTATYESLLRGADELGLRKAVKAEFGGGTRGFSCEEDFIYENVESELRFFTSQERQSIIRFWLQNLRAKQGEALHNVRFLEDQPIIPELAARGIIQQVFPVHEQRILNRLMKSWVQAVCENQPLDDICDYFGVKIAMYFAWLGFYTSAMVYPAVFGSVLYTFTEADQTSRDVSCVVFALFNVIWSTLFLEEWKRRGAELAYKWGTLDSPGEAVEEPRPQFRGVRRISPITRAEEFYYPPWKRLLFQLLVSLPLCLACLVCVFLLMLGCFQLQELVLSVKGLPRLARFLPKVMLALLVSVSAEGYKKLAIWLNDMENYRLESAYEKHLIIKVVLFQFVNSYLSLFYIGFYLKDMERLKELLLVLSLSQSLERQLQAVLVPLAALRFRLLLLSLRGLLLAARAKVRAGGEPVGPRRGGQRGCAGGLARRAEGACAEGIWGRGRPASRCRRLGAHAAQCTDRARGGVETRWACP

SEQ ID NO: 16966 - protein, 1199 aa, Artificial Sequence
  Synthetic polypeptide
NGDKLFGKRLLQAGRYLVSHKAWMKTVPTENCDVLMTFPDTTDDHTLLWLLNHIRVGIPELIVQVRHHRHTRAYAFFVTATYESLLRGADELGLRKAVKAEFGGGTRGFSCEEDFIYENVESELRFFTSQERQSIIRFWLQNLRAKQGEALHNVRFLEDQPIIPELAARGIIQQVFPVHEQRILNRLMKSWVQAVCENQPLDDICDYFGVKIAMYFAWLGFYTSAMVYPAVFGSVLYTFTEADQTSRDVSCVVFALFNVIWSTLFLEEWKRRGAELAYKWGTLDSPGEAVEEPRPQFRGVRRISPITRAEEFYYPPWKRLLFQLLVSLPLCLACLVCVFLLMLGCFQLQELVLSVKGLPRLARFLPKVMLALLVSVSAEGYKKLAIWLNDMENYRLESAYEKHLIIKVVLFQFVNSYLSLFYIGFYLKDMERLKEMLATLLITRQFLQNVREVLQPHLYRRLGRGELGLRAVWELARALLGLLSLRRPAPRRLEPQADEGGGGGSGGGGRRCLSGGCGAPEEEEEAALVERRRAGEGGEEGDGPPGGKEEDEDDEEEEDEEEEEDEEEGEEGGLLDCGLRLKKVSFAERGAGRRRPGPSPEALLEEGSPTMVEKGLEPGVFTLAEEDDEAEGAPGSPEREPPAILFRRAGGEGRDQGPDGGPDPEPGSNSDSTRRQRRQNRSSWIDPPEEEHSPQLTQAELESCMKKYEDTFQDYQEMFVQFGYVVLFSSAFPLAALCALVNNLIEIRSDAFKLCTGLQRPFGQRVESIGQWQKVMEAMGVLAIVVNCYLIGQCGQLQRLFPWLSPEAAIVSVVVLEHFALLLKYLIHVAIPDIPGWVAEEMAKLEYQRREAFKRHERQAQHRYQQQQRRRREEEERQRHAEHHARREHDSGGREEARAEGSGLDPATSSEKASAKAKGSTAGGHGPERPKRPGSLLAPNNVMKLKQIIPLQGKFLSSGATSSLAAAGAGATTRPPPAQSPTGSDTRLPAFLSFKFLKSPETRRDSERSHSPPKAFHAGKLFPFGGTRAEPGSNGAGGQARPDGTPSSGSSRVQRSGPVDEALAEELEAPRPEEEGSGTALAPVGAPALRTRRSRSPAPPPPMPLPRPPTPPAGCWQWDGPWGCGGEGAAPRQALAAAECPPCAMAGPPPAPQPLPGDASFYSLPPPPLPPTSDPLETPAPSPSPSPSPQAVCWPSGWH

SEQ ID NO: 16967 - protein, 40 aa, Artificial Sequence; identical to SEQ ID NO: 5777
  Synthetic polypeptide

SEQ ID NO: 16968 - protein, 13 aa, Artificial Sequence
  Synthetic polypeptide
TLWASVSSPVKWG

SEQ ID NO: 16969 - protein, 544 aa, Artificial Sequence
  Synthetic polypeptide
GWMRWLIPVIPTFWEAKWLDENEEVSRDFLHGALERDKKDGFQQTSEHALFSCSVVDVFSQLNQSFEIIKKLECPDPQIVGHYMRRFAKTISNVLLQYADIISKDFASYCSKEKEKVPCILMNNTQQLRVQLEKMFEAMGGKELDAEASDILKELQVKLNNVLDELSRVFATSFQPHIEECVKQMGDILSQVKGTGNVPASACSSVAQDADNVLQPIMDLLDSNLTLFAKICEKTVLKRVLKELWKLVMNTMEKTIVLPPLTDQTGTQMIFNAAKELGQLSKLKDHMVREEAKSLTPKQCAVVELALDTIKQYFHAGGVGLKKTFLEKSPDLQSLRYALSLYTQATDLLIKTFVQTQSAQGLGVEDPVGEVSVHVELFTHPGTGEHKVTVKVVAANDLKWQTSGIFRPFIEVNIIGPQLSDKKRKFATKSKNNSWAPKYNESFQFTLSADAGPECYELQVCVKDYCFAREDRTVGLAVLQLRELAQRGSAACWLPLGRRIHMDDTGLTVLRILSQRSNDEVAKEFVKLKSDTRSAEEGGAAPAP

SEQ ID NO: 16970 - protein, 563 aa, Artificial Sequence
  Synthetic polypeptide
GWMRWLIPVIPTFWEAKWLDENEEVSRDFLHGALERDKKDGFQQTSEHALFSCSVVDVFSQLNQSFEIIKKLECPDPQIVGHYMRRFAKTISNVLLQYADIISKDFASYCSKEKEKVPCILMNNTQQLRVQLEKMFEAMGGKELDAEASDILKELQVKLNNVLDELSRVFATSFQPHIEECVKQMGDILSQVKGTGNVPASACSSVAQDADNVLQPIMDLLDSNLTLFAKICEKTVLKRVLKELWKLVMNTMEKTIVLPPLTDQTGTQMIFNAAKELGQLSKLKDHMVREEAKSLTPKQCAVVELALDTIKQYFHAGGVGLKKTFLEKSPDLQSLRYALSLYTQATDLLIKTFVQTQSAQVHGGKGTRFTLSEDIYPEKGLGVEDPVGEVSVHVELFTHPGTGEHKVTVKVVAANDLKWQTSGIFRPFIEVNIIGPQLSDKKRKFATKSKNNSWAPKYNESFQFTLSADAGPECYELQVCVKDYCFAREDRTVGLAVLQLRELAQRGSAACWLPLGRRIHMDDTGLTVLRILSQRSNDEVAKEFVKLKSDTRSAEEGGAAPAP

SEQ ID NO: 16971 - protein, 569 aa, Artificial Sequence
  Synthetic polypeptide
GWMRWLIPVIPTFWEAKWLDENEEVSRDFLHGALERDKKDGFQQTSEHALFSCSVVDVFSQLNQSFEIIKKLECPDPQIVGHYMRRFAKTISNVLLQYADIISKDFASYCSKEKEKVPCILMNNTQQLRVQLEKMFEAMGGKELDAEASDILKELQVKLNNVLDELSRVFATSFQPHIEECVKQMGDILSQVKGTGNVPASACSSVAQDADNVLQPIMDLLDSNLTLFAKICEKTVLKRVLKELWKLVMNTMEKTIVLPPLTDQTLQGNLLRKHGKGLEKGRVKLPSHSDGTQMIFNAAKELGQLSKLKDHMVREEAKSLTPKQCAVVELALDTIKQYFHAGGVGLKKTFLEKSPDLQSLRYALSLYTQATDLLIKTFVQTQSAQGLGVEDPVGEVSVHVELFTHPGTGEHKVTVKVVAANDLKWQTSGIFRPFIEVNIIGPQLSDKKRKFATKSKNNSWAPKYNESFQFTLSADAGPECYELQVCVKDYCFAREDRTVGLAVLQLRELAQRGSAACWLPLGRRIHMDDTGLTVLRILSQRSNDEVAKEFVKLKSDTRSAEEGGAAPAP

SEQ ID NO: 16972 - protein, 569 aa, Artificial Sequence
  Synthetic polypeptide
GWMRWLIPVIPTFWEAKWLDENEEVSRDFLHGALERDKKDGFQQTSEHALFSCSVVDVFSQLNQSFEIIKKLECPDPQIVGHYMRRFAKTISNVLLQYADIISKDFASYCSKEKEKVPCILMNNTQQLRVQLEKMFEAMGGKELDAEASDILKELQVKLNNVLDELSRVFATSFQPHIEECVKQMGDILSQVKGTGNVPASACSSVAQDADNVLQPIMDLLDSNLTLFAKICEKTVLKRVLKELWKLVMNTMEKTIVLPPLTDQTMIGNLLRKHGKGLEKGRVKLPSHSDGTQMIFNAAKELGQLSKLKDHMVREEAKSLTPKQCAVVELALDTIKQYFHAGGVGLKKTFLEKSPDLQSLRYALSLYTQATDLLIKTFVQTQSAQGLGVEDPVGEVSVHVELFTHPGTGEHKVTVKVVAANDLKWQTSGIFRPFIEVNIIGPQLSDKKRKFATKSKNNSWAPKYNESFQFTLSADAGPECYELQVCVKDYCFAREDRTVGLAVLQLRELAQRGSAACWLPLGRRIHMDDTGLTVLRILSQRSNDEVAKEFVKLKSDTRSAEEGGAAPAP

SEQ ID NO: 16973 - protein, 588 aa, Artificial Sequence
  Synthetic polypeptide
GWMRWLIPVIPTFWEAKWLDENEEVSRDFLHGALERDKKDGFQQTSEHALFSCSVVDVFSQLNQSFEIIKKLECPDPQIVGHYMRRFAKTISNVLLQYADIISKDFASYCSKEKEKVPCILMNNTQQLRVQLEKMFEAMGGKELDAEASDILKELQVKLNNVLDELSRVFATSFQPHIEECVKQMGDILSQVKGTGNVPASACSSVAQDADNVLQPIMDLLDSNLTLFAKICEKTVLKRVLKELWKLVMNTMEKTIVLPPLTDQTMIGNLLRKHGKGLEKGRVKLPSHSDGTQMIFNAAKELGQLSKLKDHMVREEAKSLTPKQCAVVELALDTIKQYFHAGGVGLKKTFLEKSPDLQSLRYALSLYTQATDLLIKTFVQTQSAQVHGGKGTRFTLSEDIYPEKGLGVEDPVGEVSVHVELFTHPGTGEHKVTVKVVAANDLKWQTSGIFRPFIEVNIIGPQLSDKKRKFATKSKNNSWAPKYNESFQFTLSADAGPECYELQVCVKDYCFAREDRTVGLAVLQLRELAQRGSAACWLPLGRRIHMDDTGLTVLRILSQRSNDEVAKEFVKLKSDTRSAEEGGAAPAP

SEQ ID NO: 16974 - protein, 19 aa, Artificial Sequence
  Synthetic polypeptide
MDAVAHSCNPNILGGQVAG

SEQ ID NO: 16975 - protein, 74 aa, Artificial Sequence
  Synthetic polypeptide
SQHFGRPSGWMRMRRCPGISCTVPWSETRRMGSSRPQSMPYSPAPWWMFSPNSTRALKSSRNSSVPTLRSWGTT

SEQ ID NO: 16976 - protein, 19 aa, Artificial Sequence
  Synthetic polypeptide
GWMRWLIPVIPTFWEAKMV

SEQ ID NO: 16977 - protein, 91 aa, Artificial Sequence
  Synthetic polypeptide
MDAVAHSCNPNILGGQDGLNPSSSSGWMRMRRCPGISCTVPWSETRRMGSSRPQSMPYSPAPWWMFSPNSTRALKSSRNSSVPTLRSWGTT

SEQ ID NO: 16978 - protein, 543 aa, Artificial Sequence
  Synthetic polypeptide
SQHFGRPRWFEPFVIQWLDENEEVSRDFLHGALERDKKDGFQQTSEHALFSCSVVDVFSQLNQSFEIIKKLECPDPQIVGHYMRRFAKTISNVLLQYADIISKDFASYCSKEKEKVPCILMNNTQQLRVQLEKMFEAMGGKELDAEASDILKELQVKLNNVLDELSRVFATSFQPHIEECVKQMGDILSQVKGTGNVPASACSSVAQDADNVLQPIMDLLDSNLTLFAKICEKTVLKRVLKELWKLVMNTMEKTIVLPPLTDQTGTQMIFNAAKELGQLSKLKDHMVREEAKSLTPKQCAVVELALDTIKQYFHAGGVGLKKTFLEKSPDLQSLRYALSLYTQATDLLIKTFVQTQSAQGLGVEDPVGEVSVHVELFTHPGTGEHKVTVKVVAANDLKWQTSGIFRPFIEVNIIGPQLSDKKRKFATKSKNNSWAPKYNESFQFTLSADAGPECYELQVCVKDYCFAREDRTVGLAVLQLRELAQRGSAACWLPLGRRIHMDDTGLTVLRILSQRSNDEVAKEFVKLKSDTRSAEEGGAAPAP

SEQ ID NO: 16979 - protein, 562 aa, Artificial Sequence
  Synthetic polypeptide
SQHFGRPRWFEPFVIQWLDENEEVSRDFLHGALERDKKDGFQQTSEHALFSCSVVDVFSQLNQSFEIIKKLECPDPQIVGHYMRRFAKTISNVLLQYADIISKDFASYCSKEKEKVPCILMNNTQQLRVQLEKMFEAMGGKELDAEASDILKELQVKLNNVLDELSRVFATSFQPHIEECVKQMGDILSQVKGTGNVPASACSSVAQDADNVLQPIMDLLDSNLTLFAKICEKTVLKRVLKELWKLVMNTMEKTIVLPPLTDQTGTQMIFNAAKELGQLSKLKDHMVREEAKSLTPKQCAVVELALDTIKQYFHAGGVGLKKTFLEKSPDLQSLRYALSLYTQATDLLIKTFVQTQSAQVHGGKGTRFTLSEDIYPEKGLGVEDPVGEVSVHVELFTHPGTGEHKVTVKVVAANDLKWQTSGIFRPFIEVNIIGPQLSDKKRKFATKSKNNSWAPKYNESFQFTLSADAGPECYELQVCVKDYCFAREDRTVGLAVLQLRELAQRGSAACWLPLGRRIHMDDTGLTVLRILSQRSNDEVAKEFVKLKSDTRSAEEGGAAPAP

SEQ ID NO: 16980 - protein, 568 aa, Artificial Sequence
  Synthetic polypeptide
SQHFGRPRWFEPFVIQWLDENEEVSRDFLHGALERDKKDGFQQTSEHALFSCSVVDVFSQLNQSFEIIKKLECPDPQIVGHYMRRFAKTISNVLLQYADIISKDFASYCSKEKEKVPCILMNNTQQLRVQLEKMFEAMGGKELDAEASDILKELQVKLNNVLDELSRVFATSFQPHIEECVKQMGDILSQVKGTGNVPASACSSVAQDADNVLQPIMDLLDSNLTLFAKICEKTVLKRVLKELWKLVMNTMEKTIVLPPLTDQTLQGNLLRKHGKGLEKGRVKLPSHSDGTQMIFNAAKELGQLSKLKDHMVREEAKSLTPKQCAVVELALDTIKQYFHAGGVGLKKTFLEKSPDLQSLRYALSLYTQATDLLIKTFVQTQSAQGLGVEDPVGEVSVHVELFTHPGTGEHKVTVKVVAANDLKWQTSGIFRPFIEVNIIGPQLSDKKRKFATKSKNNSWAPKYNESFQFTLSADAGPECYELQVCVKDYCFAREDRTVGLAVLQLRELAQRGSAACWLPLGRRIHMDDTGLTVLRILSQRSNDEVAKEFVKLKSDTRSAEEGGAAPAP

SEQ ID NO: 16981 - protein, 568 aa, Artificial Sequence
  Synthetic polypeptide
SQHFGRPRWFEPFVIQWLDENEEVSRDFLHGALERDKKDGFQQTSEHALFSCSVVDVFSQLNQSFEIIKKLECPDPQIVGHYMRRFAKTISNVLLQYADIISKDFASYCSKEKEKVPCILMNNTQQLRVQLEKMFEAMGGKELDAEASDILKELQVKLNNVLDELSRVFATSFQPHIEECVKQMGDILSQVKGTGNVPASACSSVAQDADNVLQPIMDLLDSNLTLFAKICEKTVLKRVLKELWKLVMNTMEKTIVLPPLTDQTMIGNLLRKHGKGLEKGRVKLPSHSDGTQMIFNAAKELGQLSKLKDHMVREEAKSLTPKQCAVVELALDTIKQYFHAGGVGLKKTFLEKSPDLQSLRYALSLYTQATDLLIKTFVQTQSAQGLGVEDPVGEVSVHVELFTHPGTGEHKVTVKVVAANDLKWQTSGIFRPFIEVNIIGPQLSDKKRKFATKSKNNSWAPKYNESFQFTLSADAGPECYELQVCVKDYCFAREDRTVGLAVLQLRELAQRGSAACWLPLGRRIHMDDTGLTVLRILSQRSNDEVAKEFVKLKSDTRSAEEGGAAPAP

SEQ ID NO: 16982 - protein, 587 aa, Artificial Sequence
  Synthetic polypeptide
SQHFGRPRWFEPFVIQWLDENEEVSRDFLHGALERDKKDGFQQTSEHALFSCSVVDVFSQLNQSFEIIKKLECPDPQIVGHYMRRFAKTISNVLLQYADIISKDFASYCSKEKEKVPCILMNNTQQLRVQLEKMFEAMGGKELDAEASDILKELQVKLNNVLDELSRVFATSFQPHIEECVKQMGDILSQVKGTGNVPASACSSVAQDADNVLQPIMDLLDSNLTLFAKICEKTVLKRVLKELWKLVMNTMEKTIVLPPLTDQTMIGNLLRKHGKGLEKGRVKLPSHSDGTQMIFNAAKELGQLSKLKDHMVREEAKSLTPKQCAVVELALDTIKQYFHAGGVGLKKTFLEKSPDLQSLRYALSLYTQATDLLIKTFVQTQSAQVHGGKGTRFTLSEDIYPEKGLGVEDPVGEVSVHVELFTHPGTGEHKVTVKVVAANDLKWQTSGIFRPFIEVNIIGPQLSDKKRKFATKSKNNSWAPKYNESFQFTLSADAGPECYELQVCVKDYCFAREDRTVGLAVLQLRELAQRGSAACWLPLGRRIHMDDTGLTVLRILSQRSNDEVAKEFVKLKSDTRSAEEGGAAPAP

SEQ ID NO: 16983 - protein, 760 aa, Artificial Sequence
  Synthetic polypeptide
GQEFETSLANTKERFVKLLDQLHNSLRIDLSMYRNNFPASSPERLQDLKSTVDLLTSITFFRMKVQELQSPPRASQVVKDCVKACLNSTYEYIFNNCHELYSREYQTDPAKKGEVLPEEQGPSIKNLDFWSKLITLIVSIIEEDKNSYTPCLNQFPQELNVGKISAEVMWNLFAQDMKYAMEEHDKHRLCKSADYMNLHFKVKWLYNEYVTELPAFKDRVPEYPAWFEPFVIQWLDENEEVSRDFLHGALERDKKDGFQQTSEHALFSCSVVDVFSQLNQSFEIIKKLECPDPQIVGHYMRRFAKTISNVLLQYADIISKDFASYCSKEKEKVPCILMNNTQQLRVQLEKMFEAMGGKELDAEASDILKELQVKLNNVLDELSRVFATSFQPHIEECVKQMGDILSQVKGTGNVPASACSSVAQDADNVLQPIMDLLDSNLTLFAKICEKTVLKRVLKELWKLVMNTMEKTIVLPPLTDQTGTQMIFNAAKELGQLSKLKDHMVREEAKSLTPKQCAVVELALDTIKQYFHAGGVGLKKTFLEKSPDLQSLRYALSLYTQATDLLIKTFVQTQSAQGLGVEDPVGEVSVHVELFTHPGTGEHKVTVKVVAANDLKWQTSGIFRPFIEVNIIGPQLSDKKRKFATKSKNNSWAPKYNESFQFTLSADAGPECYELQVCVKDYCFAREDRTVGLAVLQLRELAQRGSAACWLPLGRRIHMDDTGLTVLRILSQRSNDEVAKEFVKLKSDTRSAEEGGAAPAP

SEQ ID NO: 16984 - protein, 779 aa, Artificial Sequence
  Synthetic polypeptide
GQEFETSLANTKERFVKLLDQLHNSLRIDLSMYRNNFPASSPERLQDLKSTVDLLTSITFFRMKVQELQSPPRASQVVKDCVKACLNSTYEYIFNNCHELYSREYQTDPAKKGEVLPEEQGPSIKNLDFWSKLITLIVSIIEEDKNSYTPCLNQFPQELNVGKISAEVMWNLFAQDMKYAMEEHDKHRLCKSADYMNLHFKVKWLYNEYVTELPAFKDRVPEYPAWFEPFVIQWLDENEEVSRDFLHGALERDKKDGFQQTSEHALFSCSVVDVFSQLNQSFEIIKKLECPDPQIVGHYMRRFAKTISNVLLQYADIISKDFASYCSKEKEKVPCILMNNTQQLRVQLEKMFEAMGGKELDAEASDILKELQVKLNNVLDELSRVFATSFQPHIEECVKQMGDILSQVKGTGNVPASACSSVAQDADNVLQPIMDLLDSNLTLFAKICEKTVLKRVLKELWKLVMNTMEKTIVLPPLTDQTGTQMIFNAAKELGQLSKLKDHMVREEAKSLTPKQCAVVELALDTIKQYFHAGGVGLKKTFLEKSPDLQSLRYALSLYTQATDLLIKTFVQTQSAQVHGGKGTRFTLSEDIYPEKGLGVEDPVGEVSVHVELFTHPGTGEHKVTVKVVAANDLKWQTSGIFRPFIEVNIIGPQLSDKKRKFATKSKNNSWAPKYNESFQFTLSADAGPECYELQVCVKDYCFAREDRTVGLAVLQLRELAQRGSAACWLPLGRRIHMDDTGLTVLRILSQRSNDEVAKEFVKLKSDTRSAEEGGAAPAP

SEQ ID NO: 16985 - protein, 785 aa, Artificial Sequence
  Synthetic polypeptide
GQEFETSLANTKERFVKLLDQLHNSLRIDLSMYRNNFPASSPERLQDLKSTVDLLTSITFFRMKVQELQSPPRASQVVKDCVKACLNSTYEYIFNNCHELYSREYQTDPAKKGEVLPEEQGPSIKNLDFWSKLITLIVSIIEEDKNSYTPCLNQFPQELNVGKISAEVMWNLFAQDMKYAMEEHDKHRLCKSADYMNLHFKVKWLYNEYVTELPAFKDRVPEYPAWFEPFVIQWLDENEEVSRDFLHGALERDKKDGFQQTSEHALFSCSVVDVFSQLNQSFEIIKKLECPDPQIVGHYMRRFAKTISNVLLQYADIISKDFASYCSKEKEKVPCILMNNTQQLRVQLEKMFEAMGGKELDAEASDILKELQVKLNNVLDELSRVFATSFQPHIEECVKQMGDILSQVKGTGNVPASACSSVAQDADNVLQPIMDLLDSNLTLFAKICEKTVLKRVLKELWKLVMNTMEKTIVLPPLTDQTLQGNLLRKHGKGLEKGRVKLPSHSDGTQMIFNAAKELGQLSKLKDHMVREEAKSLTPKQCAVVELALDTIKQYFHAGGVGLKKTFLEKSPDLQSLRYALSLYTQATDLLIKTFVQTQSAQGLGVEDPVGEVSVHVELFTHPGTGEHKVTVKVVAANDLKWQTSGIFRPFIEVNIIGPQLSDKKRKFATKSKNNSWAPKYNESFQFTLSADAGPECYELQVCVKDYCFAREDRTVGLAVLQLRELAQRGSAACWLPLGRRIHMDDTGLTVLRILSQRSNDEVAKEFVKLKSDTRSAEEGGAAPAP

SEQ ID NO: 16986 - protein, 785 aa, Artificial Sequence
  Synthetic polypeptide
GQEFETSLANTKERFVKLLDQLHNSLRIDLSMYRNNFPASSPERLQDLKSTVDLLTSITFFRMKVQELQSPPRASQVVKDCVKACLNSTYEYIFNNCHELYSREYQTDPAKKGEVLPEEQGPSIKNLDFWSKLITLIVSIIEEDKNSYTPCLNQFPQELNVGKISAEVMWNLFAQDMKYAMEEHDKHRLCKSADYMNLHFKVKWLYNEYVTELPAFKDRVPEYPAWFEPFVIQWLDENEEVSRDFLHGALERDKKDGFQQTSEHALFSCSVVDVFSQLNQSFEIIKKLECPDPQIVGHYMRRFAKTISNVLLQYADIISKDFASYCSKEKEKVPCILMNNTQQLRVQLEKMFEAMGGKELDAEASDILKELQVKLNNVLDELSRVFATSFQPHIEECVKQMGDILSQVKGTGNVPASACSSVAQDADNVLQPIMDLLDSNLTLFAKICEKTVLKRVLKELWKLVMNTMEKTIVLPPLTDQTMIGNLLRKHGKGLEKGRVKLPSHSDGTQMIFNAAKELGQLSKLKDHMVREEAKSLTPKQCAVVELALDTIKQYFHAGGVGLKKTFLEKSPDLQSLRYALSLYTQATDLLIKTFVQTQSAQGLGVEDPVGEVSVHVELFTHPGTGEHKVTVKVVAANDLKWQTSGIFRPFIEVNIIGPQLSDKKRKFATKSKNNSWAPKYNESFQFTLSADAGPECYELQVCVKDYCFAREDRTVGLAVLQLRELAQRGSAACWLPLGRRIHMDDTGLTVLRILSQRSNDEVAKEFVKLKSDTRSAEEGGAAPAP

SEQ ID NO: 16987 - protein, 804 aa, Artificial Sequence
  Synthetic polypeptide
GQEFETSLANTKERFVKLLDQLHNSLRIDLSMYRNNFPASSPERLQDLKSTVDLLTSITFFRMKVQELQSPPRASQVVKDCVKACLNSTYEYIFNNCHELYSREYQTDPAKKGEVLPEEQGPSIKNLDFWSKLITLIVSIIEEDKNSYTPCLNQFPQELNVGKISAEVMWNLFAQDMKYAMEEHDKHRLCKSADYMNLHFKVKWLYNEYVTELPAFKDRVPEYPAWFEPFVIQWLDENEEVSRDFLHGALERDKKDGFQQTSEHALFSCSVVDVFSQLNQSFEIIKKLECPDPQIVGHYMRRFAKTISNVLLQYADIISKDFASYCSKEKEKVPCILMNNTQQLRVQLEKMFEAMGGKELDAEASDILKELQVKLNNVLDELSRVFATSFQPHIEECVKQMGDILSQVKGTGNVPASACSSVAQDADNVLQPIMDLLDSNLTLFAKICEKTVLKRVLKELWKLVMNTMEKTIVLPPLTDQTMIGNLLRKHGKGLEKGRVKLPSHSDGTQMIFNAAKELGQLSKLKDHMVREEAKSLTPKQCAVVELALDTIKQYFHAGGVGLKKTFLEKSPDLQSLRYALSLYTQATDLLIKTFVQTQSAQVHGGKGTRFTLSEDIYPEKGLGVEDPVGEVSVHVELFTHPGTGEHKVTVKVVAANDLKWQTSGIFRPFIEVNIIGPQLSDKKRKFATKSKNNSWAPKYNESFQFTLSADAGPECYELQVCVKDYCFAREDRTVGLAVLQLRELAQRGSAACWLPLGRRIHMDDTGLTVLRILSQRSNDEVAKEFVKLKSDTRSAEEGGAAPAP

SEQ ID NO: 16988 - protein, 38 aa, Artificial Sequence
  Synthetic polypeptide
GRAQWLMPVIPALWEAEAGESLEARSSRPAWPTRKSAS

SEQ ID NO: 16989 - protein, 36 aa, Artificial Sequence
  Synthetic polypeptide
SQHFGRPRLENHLRPGVRDQPGQHERALRETPGPAA

SEQ ID NO: 16990 - protein, 760 aa, Artificial Sequence; identical to SEQ ID NO: 16983
  Synthetic polypeptide

SEQ ID NO: 16991 - protein, 779 aa, Artificial Sequence; identical to SEQ ID NO: 16984
  Synthetic polypeptide

SEQ ID NO: 16992 - protein, 785 aa, Artificial Sequence; identical to SEQ ID NO: 16985
  Synthetic polypeptide

SEQ ID NO: 16993 - protein, 785 aa, Artificial Sequence; identical to SEQ ID NO: 16986
  Synthetic polypeptide

SEQ ID NO: 16994 - protein, 804 aa, Artificial Sequence; identical to SEQ ID NO: 16987
  Synthetic polypeptide

SEQ ID NO: 16995 - protein, 36 aa, Artificial Sequence
  Synthetic polypeptide
SQQFGRLWRADYLRPGVRDQPGQHERALRETPGPAA

SEQ ID NO: 16996 - protein, 34 aa, Artificial Sequence
  Synthetic polypeptide
WLTPVIPAIWEAVAGRLFEARSSRPAWPTRKSAS

SEQ ID NO: 16997 - protein, 13 aa, Artificial Sequence
  Synthetic polypeptide
ARGWRRFLPVGLV

SEQ ID NO: 16998 - protein, 80 aa, Artificial Sequence
  Synthetic polypeptide
PEAGEGSCQWAWCERDQPGRLLPAACRRPARPGGPHPPPAEARGQRRCQERRPSRPAPPGLPAGPLSGGEVSVRFECKTQ

SEQ ID NO: 16999 - protein, 326 aa, Artificial Sequence
  Synthetic polypeptide
QRLAKVPASGLGVNVTSQDGSSPLHVAALHGRADLIPLLLKHGANAGARNADQAVPLHLACQQGHFQVVKCLLDSNAKPNKKDLSGNTPLIYACSGGHHELVALLLQHGASINASNNKGNTALHEAVIEKHVFVVELLLLHGASVQVLNKRQRTAVDCAEQNSKIMELLQVVPSCVASLDDVAETDRKEYVTVKIRKKWNSKLYDLPDEPFTRQFYFVHSAGQFKGKTSREIMARDRSVPNLTEGSLHEPGRQSVTLRQNNLPAQSGSHAAEKGNSDWPERPGLTQTGPGHRRMLRRHTVEDAVVSQGPEAAGPLSTPQEVSASRS

SEQ ID NO: 17000 - protein, 750 aa, Artificial Sequence
  Synthetic polypeptide
HVNLETMCADDLLSVLLYLLVKTEIPNWMANLSYIKNFRFSSLAKDELGYCLTSFEAAIEYIRQGSLSAKPPESEGFGDRLFLKQRMSLLSQMTSSPTDCLFKHIASGNQKEVERLLSQEDHDKDTVQKMCHPLCFCDDCEKLVSGRLNDPSVVTPFSRDDRGHTPLHVAAVCGQASLIDLLVSKGAMVNATDYHGATPLHLACQKGYQSVTLLLLHYKASAEVQDNNGNTPLHLACTYGHEDCVKALVYYDVESCRLDIGNEKGDTPLHIAARWGYQGVIETLLQNGASTEIQNRLKETPLKCALNSKILSVMEAYHLSFERRQKSSEAPVQSPQRSVDSISQESSTSSFSSMSASSRQEETKKDYREVEKLLRAVADGDLEMVRYLLEWTEEDLEDAEDTVSAADPEFCHPLCQCPKCAPAQKRLAKVPASGLGVNVTSQDGSSPLHVAALHGRADLIPLLLKHGANAGARNADQAVPLHLACQQGHFQVVKCLLDSNAKPNKKDLSGNTPLIYACSGGHHELVALLLQHGASINASNNKGNTALHEAVIEKHVFVVELLLLHGASVQVLNKRQRTAVDCAEQNSKIMELLQVVPSCVASLDDVAETDRKEYVTVKIRKKWNSKLYDLPDEPFTRQFYFVHSAGQFKGKTSREIMARDRSVPNLTEGSLHEPGRQSVTLRQNNLPAQSGSHAAEKGNSDWPERPGLTQTGPGHRRMLRRHTVEDAVVSQGPEAAGPLSTPQEVSASRS

SEQ ID NO: 17001 - protein, 89 aa, Artificial Sequence
  Synthetic polypeptide
HVNLETMCADDLLSVLLYLLVKTEIPNWMANLSYIKNFRFSSLAKDELGYCLTSFEAAIEYIRQGSLSAKPPVRSHPCPGLPLWASWFP

SEQ ID NO: 17002 - protein, 31 aa, Artificial Sequence
  Synthetic polypeptide
SQHFGRLRRADHEVRRSRPSWLAREPGDHVC

SEQ ID NO: 17003 - protein, 13 aa, Artificial Sequence
  Synthetic polypeptide
GGQITSEPGDHVC

SEQ ID NO: 17004 - protein, 771 aa, Artificial Sequence
  Synthetic polypeptide
GWARWLTPVIPALWEAEAGRSRVNLETMCADDLLSVLLYLLVKTEIPNWMANLSYIKNFRFSSLAKDELGYCLTSFEAAIEYIRQGSLSAKPPESEGFGDRLFLKQRMSLLSQMTSSPTDCLFKHIASGNQKEVERLLSQEDHDKDTVQKMCHPLCFCDDCEKLVSGRLNDPSVVTPFSRDDRGHTPLHVAAVCGQASLIDLLVSKGAMVNATDYHGATPLHLACQKGYQSVTLLLLHYKASAEVQDNNGNTPLHLACTYGHEDCVKALVYYDVESCRLDIGNEKGDTPLHIAARWGYQGVIETLLQNGASTEIQNRLKETPLKCALNSKILSVMEAYHLSFERRQKSSEAPVQSPQRSVDSISQESSTSSFSSMSASSRQEETKKDYREVEKLLRAVADGDLEMVRYLLEWTEEDLEDAEDTVSAADPEFCHPLCQCPKCAPAQKRLAKVPASGLGVNVTSQDGSSPLHVAALHGRADLIPLLLKHGANAGARNADQAVPLHLACQQGHFQVVKCLLDSNAKPNKKDLSGNTPLIYACSGGHHELVALLLQHGASINASNNKGNTALHEAVIEKHVFVVELLLLHGASVQVLNKRQRTAVDCAEQNSKIMELLQVVPSCVASLDDVAETDRKEYVTVKIRKKWNSKLYDLPDEPFTRQFYFVHSAGQFKGKTSREIMARDRSVPNLTEGSLHEPGRQSVTLRQNNLPAQSGSHAAEKGNSDWPERPGLTQTGPGHRRMLRRHTVEDAVVSQGPEAAGPLSTPQEVSASRS

SEQ ID NO: 17005 - protein, 110 aa, Artificial Sequence
  Synthetic polypeptide
GWARWLTPVIPALWEAEAGRSRVNLETMCADDLLSVLLYLLVKTEIPNWMANLSYIKNFRFSSLAKDELGYCLTSFEAAIEYIRQGSLSAKPPVRSHPCPGLPLWASWFP

SEQ ID NO: 17006 - protein, 44 aa, Artificial Sequence
  Synthetic polypeptide
GLRAAAERGGGTPLLSPGGPPTVSSLPPAAPPTWASSLTHCARH

SEQ ID NO: 17007 - protein, 73 aa, Artificial Sequence
  Synthetic polypeptide
NPVSTKNTKISQAWWRAPVVPATQEAEDCGLQLSGEEGRRCYPLAGHLLCRRCHLRRLQPGPLPSPTVHVTEL

SEQ ID NO: 17008 - protein, 13 aa, Artificial Sequence
  Synthetic polypeptide
SQLLRRLRTAGCS

SEQ ID NO: 17009 - protein, 66 aa, Artificial Sequence
  Synthetic polypeptide
DRARWLTPVIPALWEAEAGGSRGLRAAAERGGGTPLLSPGGPPTVSSLPPAAPPTWASSLTHCARH

SEQ ID NO: 17010 - protein, 27 aa, Artificial Sequence
  Synthetic polypeptide
PGAVAHACNPSTLGGRGGRITRTAGCS

SEQ ID NO: 17011 - protein, 59 aa, Artificial Sequence
  Synthetic polypeptide
SQHFGRPRRADHEDCGLQLSGEEGRRCYPLAGHLLCRRCHLRRLQPGPLPSPTVHVTEL

SEQ ID NO: 17012 - protein, 23 aa, Artificial Sequence
  Synthetic polypeptide
DAESPRALAPGASVLRLRAGPHQ

SEQ ID NO: 17013 - protein, 38 aa, Artificial Sequence; identical to SEQ ID NO: 5947
  Synthetic polypeptide

SEQ ID NO: 17014 - protein, 526 aa, Artificial Sequence; identical to SEQ ID NO: 1974
  Synthetic polypeptide

SEQ ID NO: 17015 - protein, 522 aa, Artificial Sequence; identical to SEQ ID NO: 1986
  Synthetic polypeptide

SEQ ID NO: 17016 - protein, 23 aa, Artificial Sequence
  Synthetic polypeptide
MQQCPQPAGAAWRWTRRPRPCMG

SEQ ID NO: 17017 - protein, 44 aa, Artificial Sequence
  Synthetic polypeptide
QWCKCSSVLSLRGLRGGGLGDRGRVWDDLQNSLHLLQAPQRDQR

SEQ ID NO: 17018 - protein, 231 aa, Artificial Sequence
  Synthetic polypeptide
STQELRGQTVVAGVQILLPSSGVNAAVSSACGGCVEVDSETEAVYGMTFKILCISCKRRSETNAETFTEWTFRQKGTEEFVKILRYENEVLQLEEDERFEGRVVWNGSRGTKDLQDLSIFITNVTYNHSGDYECHVYRLLFFENYEHNTSVVKKIHIEVVDKANRDMASIVSEIMMYVLIVVLTIWLVAEMIYCYKKIAAATETAAQENASEYLAITSESKENCTGVQVAE

SEQ ID NO: 17019 - protein, 281 aa, Artificial Sequence
  Synthetic polypeptide
STQELRGQTVVAGVQILLPSSGVNAAVSSACGGCVEVDSETEAVYGMTFKILCISCKRRSETNAETFTEWTFRQKGTEEFVKILRYENEVLQLEEDERFEGRVVWNGSRGTKDLQDLSIFITNVTYNHSGDYECHVYRLLFFENYEHNTSVVKKIHIEVVDKGESGAACPFTVTHRRARWRDRWQAVDRTGWLCAWPANRPQQRAEGEGSSPSCPLQLWPLFLSSPRRGQSMPVPHRRSGYRTQLCHLCCMTSGRCLLSLSQRVVLGLPGIIIRCVSRGVV

SEQ ID NO: 17020 - protein, 160 aa, Artificial Sequence
  Synthetic polypeptide
STQELRGQTVVAGVQILLPSSGVNAAVSSACGGCVEVDSETEAVYGMTFKILCISCKRRSETNAETFTEWTFRQKGTEEFVKKIHIEVVDKANRDMASIVSEIMMYVLIVVLTIWLVAEMIYCYKKIAAATETAAQENASEYLAITSESKENCTGVQVAE

SEQ ID NO: 17021 - protein, 45 aa, Artificial Sequence
  Synthetic polypeptide
ISQVWWCTPVVLATQEVECRSALRTLGSWSLTRRKGRGGCCAPRA

SEQ ID NO: 17022 - protein, 49 aa, Artificial Sequence
  Synthetic polypeptide
ISQVWWCTPVVLATQEVECRSALRTLGSWSLTRRKGRGGCCAPRAPTPG

SEQ ID NO: 17023 - protein, 18 aa, Artificial Sequence
  Synthetic polypeptide
LLRRLSAGQLCGRSAHGL

SEQ ID NO: 17024 - protein, 27 aa, Artificial Sequence
  Synthetic polypeptide
VQVSSADARLMVFDKTEGTWRLLCSSR

SEQ ID NO: 17025 - protein, 364 aa, Artificial Sequence
  Synthetic polypeptide
VQVSSADARLMVFDKTEGTWRLLCSSRSNARVAGLSCEEMGFLRALTHSELDVRTAGANGTSGFFCVDEGRLPHTQRLLEVISVCDCPRGRFLAAICQDCGRRKLPVDRIVGGRDTSLGRWPWQVSLRYDGAHLCGGSLLSGDWVLTAAHCFPERNRVLSRWRVFAGAVAQASPHGLQLGVQAVVYHGGYLPFRDPNSEENSNDIALVHLSSPLPLTEYIQPVCLPAAGQALVDGKICTVTGWGNTQYYGQQAGVLQEARVPIISNDVCNGADFYGNQIKPKMFCAGYPEGGIDACQGDSGGPFVCEDSISRTPRWRLCGIVSWGTGCALAQKPGVYTKVSDFREWIFQAIKTHSEASGMVTQL

SEQ ID NO: 17026 - protein, 254 aa, Artificial Sequence
  Synthetic polypeptide
VQVSSADARLMVFDKTEGTWRLLCSSRSNARVAGLSCEEMGFLRRNRVLSRWRVFAGAVAQASPHGLQLGVQAVVYHGGYLPFRDPNSEENSNDIALVHLSSPLPLTEYIQPVCLPAAGQALVDGKICTVTGWGNTQYYGQQAGVLQEARVPIISNDVCNGADFYGNQIKPKMFCAGYPEGGIDACQGDSGGPFVCEDSISRTPRWRLCGIVSWGTGCALAQKPGVYTKVSDFREWIFQAIKTHSEASGMVTQL

SEQ ID NO: 17027 - protein, 53 aa, Artificial Sequence
  Synthetic polypeptide
GQAWWLTPVIPALREAGARVSPSPHSTVQLRLISQPSEMPAFLSRASALTCRR

SEQ ID NO: 17028 - protein, 35 aa, Artificial Sequence
  Synthetic polypeptide
GRPGPEFHPVPTPRCSCGLSLSPARCQPSCPGPAL

SEQ ID NO: 17029 - protein, 136 aa, Artificial Sequence
  Synthetic polypeptide
PGVVAHTCNPSTEGGRGPSFTQSPLHGAAAAYLSAQRDASLPVPGQRSDMQKVTLGLLVFLAGFPVLDANDLEDKNSPFYYDWHSLQVGGLICAGVLCAMGIIIVMSAKCKCKFGQKSGHHPGETPPLITPGSAQS

SEQ ID NO: 17030 - protein, 39 aa, Artificial Sequence
  Synthetic polypeptide
LDWHSLQVGGLICAGVLCAMGIIIVMSAKCKCKFGQKSG

SEQ ID NO: 17031 - protein, 56 aa, Artificial Sequence
  Synthetic polypeptide
LDWHSLQVGGLICAGVLCAMGIIIVMSAKCKCKFGQKSGHHPGETPPLITPGSAQS

SEQ ID NO: 17032 - protein, 65 aa, Artificial Sequence
  Synthetic polypeptide
LDWHSLQVGGLICAGVLCAMGIIIVMSEWRSSGEQAGRGWGSPPLTTQLSPTGAKCKCKFGQKSG

SEQ ID NO: 17033 - protein, 82 aa, Artificial Sequence
  Synthetic polypeptide
LDWHSLQVGGLICAGVLCAMGIIIVMSEWRSSGEQAGRGWGSPPLTTQLSPTGAKCKCKFGQKSGHHPGETPPLITPGSAQS

SEQ ID NO: 17034 - protein, 26 aa, Artificial Sequence
  Synthetic polypeptide
RLAQPPGWRAHLRWGSVRHGHHHRHE

SEQ ID NO: 17035 - protein, 56 aa, Artificial Sequence
  Synthetic polypeptide
RLAQPPGWRAHLRWGSVRHGHHHRHECKMQMQVWPEVRSPSRGDSTSHHPRLSPKL

SEQ ID NO: 17036 - protein, 39 aa, Artificial Sequence
  Synthetic polypeptide
RLAQPPGWRAHLRWGSVRHGHHHRHECKMQMQVWPEVRV

SEQ ID NO: 17037 - protein, 38 aa, Artificial Sequence
  Synthetic polypeptide
PCTTDRVCWCVNQNTGTASRLAGSSALGFCAPWASSSS

SEQ ID NO: 17038 - protein, 28 aa, Artificial Sequence
  Synthetic polypeptide
TRILAQPPGWRAHLRWGSVRHGHHHRHE

SEQ ID NO: 17039 - protein, 58 aa, Artificial Sequence
  Synthetic polypeptide
TRILAQPPGWRAHLRWGSVRHGHHHRHECKMQMQVWPEVRSPSRGDSTSHHPRLSPKL

SEQ ID NO: 17040 - protein, 41 aa, Artificial Sequence
  Synthetic polypeptide
TRILAQPPGWRAHLRWGSVRHGHHHRHECKMQMQVWPEVRV

SEQ ID NO: 17041 - protein, 80 aa, Artificial Sequence
  Synthetic polypeptide
VSATMPSPPSDFPSPTPLIFLQTTYLCLTLHDRSCLLVCEPEYWHSLQVGGLICAGVLCAMGIIIVMSAKCKCKFGQKSG

SEQ ID NO: 17042 - protein, 97 aa, Artificial Sequence
  Synthetic polypeptide
VSATMPSPPSDFPSPTPLIFLQTTYLCLTLHDRSCLLVCEPEYWHSLQVGGLICAGVLCAMGIIIVMSAKCKCKFGQKSGHHPGETPPLITPGSAQS

SEQ ID NO: 17043 - protein, 106 aa, Artificial Sequence
  Synthetic polypeptide
VSATMPSPPSDFPSPTPLIFLQTTYLCLTLHDRSCLLVCEPEYWHSLQVGGLICAGVLCAMGIIIVMSEWRSSGEQAGRGWGSPPLTTQLSPTGAKCKCKFGQKSG

SEQ ID NO: 17044 - protein, 123 aa, Artificial Sequence
  Synthetic polypeptide
VSATMPSPPSDFPSPTPLIFLQTTYLCLTLHDRSCLLVCEPEYWHSLQVGGLICAGVLCAMGIIIVMSEWRSSGEQAGRGWGSPPLTTQLSPTGAKCKCKFGQKSGHHPGETPPLITPGSAQS

SEQ ID NO: 17045 - protein, 10 aa, Artificial Sequence
  Synthetic polypeptide
AQEFETSLER

SEQ ID NO: 17046 - protein, 17 aa, Artificial Sequence
  Synthetic polypeptide
AQEFETSLERPFPPHIQ

SEQ ID NO: 17047 - protein, 96 aa, Artificial Sequence
  Synthetic polypeptide
AQEFETSLERPFPPHIQLPPEIQESQEVTLTCLLNFSCYGYPIQLQWLLEGVPMRQAAVTSTSLTIKSVFTRSELKFSPQWSHHGKIVTCQLQDAD

SEQ ID NO: 17048 - protein, 541 aa, Artificial Sequence
  Synthetic polypeptide
AQEFETSLERPFPPHIQLPPEIQESQEVTLTCLLNFSCYGYPIQLQWLLEGVPMRQAAVTSTSLTIKSVFTRSELKFSPQWSHHGKIVTCQLQDADGKFLSNDTVQLNVKHPPKKVTTVIQNPMPIREGDTVTLSCNYNSSNPSVTRYEWKPHGAWEEPSLGVLKIQNVGWDNTTIACAACNSWCSWASPVALNVQYAPRDVRVRKIKPLSEIHSGNSVSLQCDFSSSHPKEVQFFWEKNGRLLGKESQLNFDSISPEDAGSYSCWVNNSIGQTASKAWTLEVLYAPRRLRVSMSPGDQVMEGKSATLTCESDANPPVSHYTWFDWNNQSLPYHSQKLRLEPVKVQHSGAYWCQGTNSVGKGRSPLSTLTVYYSPETIGRRVAVGLGSCLAILILAICGLKLQRRWKRTQSQQGLQENSSGQSFFVRNKKVRRAPLSEGPHSLGCYNPMMEDGISYTTLRFPEMNIPRTGDAESSEMQRPPPDCDDTVTYSALHKRQVGDYENVIPDFPEDEGIHYSELIQFGVGERPQAQENVDYVILKH

SEQ ID NO: 17049 - protein, 653 aa, Artificial Sequence
  Synthetic polypeptide
AQEFETSLERPFPPHIQLPPEIQESQEVTLTCLLNFSCYGYPIQLQWLLEGVPMRQAAVTSTSLTIKSVFTRSELKFSPQWSHHGKIVTCQLQDADGKFLSNDTVQLNVKHTPKLEIKVTPSDAIVREGDSVTMTCEVSSSNPEYTTVSWLKDGTSLKKQNTFTLNLREVTKDQSGKYCCQVSNDVGPGRSEEVFLQVQYAPEPSTVQILHSPAVEGSQVEFLCMSLANPLPTNYTWYHNGKEMQGRTEEKVHIPKILPWHAGTYSCVAENILGTGQRGPGAELDVQYPPKKVTTVIQNPMPIREGDTVTLSCNYNSSNPSVTRYEWKPHGAWEEPSLGVLKIQNVGWDNTTIACAACNSWCSWASPVALNVQYAPRDVRVRKIKPLSEIHSGNSVSLQCDFSSSHPKEVQFFWEKNGRLLGKESQLNFDSISPEDAGSYSCWVNNSIGQTASKAWTLEVLYAPRRLRVSMSPGDQVMEGKSATLTCESDANPPVSHYTWFDWNNQSLPYHSQKLRLEPVKVQHSGAYWCQGTNSVGKGRSPLSTLTVYYSPETIGRRVAVGLGSCLAILILAICGLKLQRRDAESSEMQRPPPDCDDTVTYSALHKRQVGDYENVIPDFPEDEGIHYSELIQFGVGERPQAQENVDYVILKH

SEQ ID NO: 17050 - protein, 622 aa, Artificial Sequence
  Synthetic polypeptide
AQEFETSLERPFPPHIQLPPEIQESQEVTLTCLLNFSCYGYPIQLQWLLEGVPMRQAAVTSTSLTIKSVFTRSELKFSPQWSHHGKIVTCQLQDADGKFLSNDTVQLNVKHTPKLEIKVTPSDAIVREGDSVTMTCEVSSSNPEYTTVSWLKDGTSLKKQNTFTLNLREVTKDQSGKYCCQVSNDVGPGRSEEVFLQVQYAPEPSTVQILHSPAVEGSQVEFLCMSLANPLPTNYTWYHNGKEMQGRTEEKVHIPKILPWHAGTYSCVAENILGTGQRGPGAELDVQYPPKKVTTVIQNPMPIREGDTVTLSCNYNSSNPSVTRYEWKPHGAWEEPSLGVLKIQNVGWDNTTIACAACNSWCSWASPVALNVQYAPRDVRVRKIKPLSEIHSGNSVSLQCDFSSSHPKEVQFFWEKNGRLLGKESQLNFDSISPEDAGSYSCWVNNSIGQTASKAWTLEVLYAPRRLRVSMSPGDQVMEGKSATLTCESDANPPVSHYTWFDWNNQSLPYHSQKLRLEPVKVQHSGAYWCQGTNSVGKGRSPLSTLTVYYSPETIGRRVAVGLGSCLAILILAICGLKLQRRWKRTQSQQGLQENSSGQSFFVRNKKRCRVLRDAETSPGLR

SEQ ID NO: 17051 - protein, 718 aa, Artificial Sequence
  Synthetic polypeptide
AQEFETSLERPFPPHIQLPPEIQESQEVTLTCLLNFSCYGYPIQLQWLLEGVPMRQAAVTSTSLTIKSVFTRSELKFSPQWSHHGKIVTCQLQDADGKFLSNDTVQLNVKHTPKLEIKVTPSDAIVREGDSVTMTCEVSSSNPEYTTVSWLKDGTSLKKQNTFTLNLREVTKDQSGKYCCQVSNDVGPGRSEEVFLQVQYAPEPSTVQILHSPAVEGSQVEFLCMSLANPLPTNYTWYHNGKEMQGRTEEKVHIPKILPWHAGTYSCVAENILGTGQRGPGAELDVQYPPKKVTTVIQNPMPIREGDTVTLSCNYNSSNPSVTRYEWKPHGAWEEPSLGVLKIQNVGWDNTTIACAACNSWCSWASPVALNVQYAPRDVRVRKIKPLSEIHSGNSVSLQCDFSSSHPKEVQFFWEKNGRLLGKESQLNFDSISPEDAGSYSCWVNNSIGQTASKAWTLEVLYAPRRLRVSMSPGDQVMEGKSATLTCESDANPPVSHYTWFDWNNQSLPYHSQKLRLEPVKVQHSGAYWCQGTNSVGKGRSPLSTLTVYYSPETIGRRVAVGLGSCLAILILAICGLKLQRRWKRTQSQQGLQENSSGQSFFVRNKKVRRAPLSEGPHSLGCYNPMMEDGISYTTLRFPEMNIPRTGDAESSEMQRPPPDCDDTVTYSALHKRQVGDYENVIPDFPEDEGIHYSELIQFGVGERPQAQENVDYVILKH

SEQ ID NO: 17052 - protein, 630 aa, Artificial Sequence
  Synthetic polypeptide
AQEFETSLERPFPPHIQLPPEIQESQEVTLTCLLNFSCYGYPIQLQWLLEGVPMRQAAVTSTSLTIKSVFTRSELKFSPQWSHHGKIVTCQLQDADGKFLSNDTVQLNVKHTPKLEIKVTPSDAIVREGDSVTMTCEVSSSNPEYTTVSWLKDGTSLKKQNTFTLNLREVTKDQSGKYCCQVSNDVGPGRSEEVFLQVQYPPKKVTTVIQNPMPIREGDTVTLSCNYNSSNPSVTRYEWKPHGAWEEPSLGVLKIQNVGWDNTTIACAACNSWCSWASPVALNVQYAPRDVRVRKIKPLSEIHSGNSVSLQCDFSSSHPKEVQFFWEKNGRLLGKESQLNFDSISPEDAGSYSCWVNNSIGQTASKAWTLEVLYAPRRLRVSMSPGDQVMEGKSATLTCESDANPPVSHYTWFDWNNQSLPYHSQKLRLEPVKVQHSGAYWCQGTNSVGKGRSPLSTLTVYYSPETIGRRVAVGLGSCLAILILAICGLKLQRRWKRTQSQQGLQENSSGQSFFVRNKKVRRAPLSEGPHSLGCYNPMMEDGISYTTLRFPEMNIPRTGDAESSEMQRPPPDCDDTVTYSALHKRQVGDYENVIPDFPEDEGIHYSELIQFGVGERPQAQENVDYVILKH

SEQ ID NO: 17053 - protein, 6 aa, Artificial Sequence
  Synthetic polypeptide
DQPGKA

SEQ ID NO: 17054 - protein, 13 aa, Artificial Sequence
  Synthetic polypeptide
DQPGKAFSTSYPA

SEQ ID NO: 17055 - protein, 92 aa, Artificial Sequence
  Synthetic polypeptide
DQPGKAFSTSYPAPSRNSRVPGSHSDLLAEFLLLWVSDPIAVAPRGGSNEAGCCHLDLLDHQVCLHPERAQVLPTVESPWEDCDLPASGCRW

SEQ ID NO: 17056 - protein, 97 aa, Artificial Sequence
  Synthetic polypeptide
DQPGKAFSTSYPAPSRNSRVPGSHSDLLAEFLLLWVSDPIAVAPRGGSNEAGCCHLDLLDHQVCLHPERAQVLPTVESPWEDCDLPASGCRWEVPLQ

SEQ ID NO: 17057 - protein, 31 aa, Artificial Sequence
  Synthetic polypeptide
VQWFPPVTPALWEAEIGGSFEPRSLRPAWKG

SEQ ID NO: 17058 - protein, 38 aa, Artificial Sequence
  Synthetic polypeptide
VQWFPPVTPALWEAEIGGSFEPRSLRPAWKGLFHLISS

SEQ ID NO: 17059 - protein, 50 aa, Artificial Sequence
  Synthetic polypeptide
VQWFPPVTPALWEAEIGGSFEPRSLRPAWKGLFHLISSSLQKFKSPRKSL

SEQ ID NO: 17060 - protein, 132 aa, Artificial Sequence
  Synthetic polypeptide
DQAQWLTPVIPALWEAKVGGHKHFGRPQDSPETIGRRVAVGLGSCLAILILAICGLKLQRRDAESSEMQRPPPDCDDTVTYSALHKRQVGDYENVIPDFPEDEGIHYSELIQFGVGERPQAQENVDYVILKH

SEQ ID NO: 17061 - protein, 101 aa, Artificial Sequence
  Synthetic polypeptide
DQAQWLTPVIPALWEAKVGGHKHFGRPQDSPETIGRRVAVGLGSCLAILILAICGLKLQRRWKRTQSQQGLQENSSGQSFFVRNKKRCRVLRDAETSPGLR

SEQ ID NO: 17062 - protein, 197 aa, Artificial Sequence
  Synthetic polypeptide
DQAQWLTPVIPALWEAKVGGHKHFGRPQDSPETIGRRVAVGLGSCLAILILAICGLKLQRRWKRTQSQQGLQENSSGQSFFVRNKKVRRAPLSEGPHSLGCYNPMMEDGISYTTLRFPEMNIPRTGDAESSEMQRPPPDCDDTVTYSALHKRQVGDYENVIPDFPEDEGIHYSELIQFGVGERPQAQENVDYVILKH

SEQ ID NO: 17063 - protein, 28 aa, Artificial Sequence
  Synthetic polypeptide
PGTVAHACNPSTLGGQSGWPQALWEATR

SEQ ID NO: 17064 - protein, 100 aa, Artificial Sequence
  Synthetic polypeptide
SQHFGRPKWVATSTLGGHKIARRPSAGEWLWDSGPASPSSSWQSVGSSSSDEMQSPQRCRDLPRTAMTRSLIQHCTSAKWATMRTSFQIFQKMRGFITQS

SEQ ID NO: 17065 - protein, 72 aa, Artificial Sequence
  Synthetic polypeptide
SQHFGRPKWVATSTLGGHKIARRPSAGEWLWDSGPASPSSSWQSVGSSSSDVGRGHRASRGFRRIPAARASL

SEQ ID NO: 17066 - protein, 108 aa, Artificial Sequence; identical to SEQ ID NO: 3524
  Synthetic polypeptide

SEQ ID NO: 17067 - protein, 80 aa, Artificial Sequence; identical to SEQ ID NO: 3953
  Synthetic polypeptide

SEQ ID NO: 17068 - protein, 130 aa, Artificial Sequence; identical to SEQ ID NO: 3278
  Synthetic polypeptide

SEQ ID NO: 17069 - protein, 99 aa, Artificial Sequence; identical to SEQ ID NO: 3638
  Synthetic polypeptide

SEQ ID NO: 17070 - protein, 195 aa, Artificial Sequence; identical to SEQ ID NO: 2886
  Synthetic polypeptide

SEQ ID NO: 17071 - protein, 73 aa, Artificial Sequence; identical to SEQ ID NO: 4117
  Synthetic polypeptide

SEQ ID NO: 17072 - protein, 65 aa, Artificial Sequence; identical to SEQ ID NO: 4434
  Synthetic polypeptide

SEQ ID NO: 17073 - protein, 48 aa, Artificial Sequence
  Synthetic polypeptide
KYKKISQMWWCMPVIPATREAEAGESLEPRRRRLWSSSPRQCCETRLP

SEQ ID NO: 17074 - protein, 138 aa, Artificial Sequence
  Synthetic polypeptide
SQLLGRLRQENRLNPGGGGCGLHRPDSAAKPACHEPRRAAVPHHGEGAAHLLARGHLEPDPGPLGVYPVPPRRAPASPASPQHPAQTESHSVAQPGVQWHDLGSLQPPPPGFKRFSCLSLPSSWDYRRKPLRPALHAL

SEQ ID NO: 17075 - protein, 102 aa, Artificial Sequence
  Synthetic polypeptide
SQLLGRLRQENRLNPGGGGCGLHRPDSAAKPACHEPRRAAVPHHGEGAAHLLARGHLEPDPGPLGVYPVPPRRAPASPASPQHPAQVAVPPAPAHAALRAAV

SEQ ID NO: 17076 - protein, 147 aa, Artificial Sequence
  Synthetic polypeptide
SQLLGRLRQENRLNPGGGGCGLHRPDSAAKPACHEPRRAAVPHHGEGAAHLLARGHLEPDPGPLGVYPVPPRRAPASPASPQHPAQVAVPPAPAHAALRAAVGSGQSAPPAPFRGALGPSDSPSACSEDSGAGGAGWTVGISSRVLG

SEQ ID NO: 17077 - protein, 152 aa, Artificial Sequence
  Synthetic polypeptide
TQEAEVVVFIAQTVLRNPPAMSPAGQLSRTTEKELLIYLRVATWNQILDPWVYILFRRAVLRRLQPRLSTRPRRSLTLWPSLEYSGTISAHCNLRLPGSSDSRASASRAAGITGVSHCARPCMLFDPEFDLLAGVQLLPFEPPTGKALSRKD

SEQ ID NO: 17078 - protein, 88 aa, Artificial Sequence
  Synthetic polypeptide
TQEAEVVVFIAQTVLRNPPAMSPAGQLSRTTEKELLIYLRVATWNQILDPWVYILFRRAVLRRLQPRLSTRPRSLSLQPQLTQRSGLQ

SEQ ID NO: 17079 - protein, 46 aa, Artificial Sequence
  Synthetic polypeptide
DVPGAADCTCGAGYAGHPHGALVRGFPERQLRPPPPPGCALPLPAW

SEQ ID NO: 17080 - protein, 72 aa, Artificial Sequence; identical to SEQ ID NO: 4141
  Synthetic polypeptide

SEQ ID NO: 17081 - protein, 196 aa, Artificial Sequence; identical to SEQ ID NO: 2878
  Synthetic polypeptide

SEQ ID NO: 17082 - protein, 317 aa, Artificial Sequence; identical to SEQ ID NO: 2453
  Synthetic polypeptide

SEQ ID NO: 17083 - protein, 577 aa, Artificial Sequence; identical to SEQ ID NO: 1910
  Synthetic polypeptide

SEQ ID NO: 17084 - protein, 576 aa, Artificial Sequence; identical to SEQ ID NO: 1911
  Synthetic polypeptide

SEQ ID NO: 17085 - protein, 62 aa, Artificial Sequence; identical to SEQ ID NO: 4594
  Synthetic polypeptide

SEQ ID NO: 17086 - protein, 53 aa, Artificial Sequence
  Synthetic polypeptide
PGMVMYPELQIARVEQATQAIPMERWCGGSRSGSCAHPHHQVVPFRCLPGEFV

SEQ ID NO: 17087 - protein, 177 aa, Artificial Sequence
  Synthetic polypeptide
PGMVMYPELQIARVEQATQAIPMERWCGGSRSGSCAHPHHQVVPFRCLPGEFVSEALLVPEGCRFLHQERMDQCESSTRRHQEAQEACSSQGLILHGSGMLLPCGSDRFRGVEYVCCPPPGTPDPSGTAVGDPSTRSWPPGSRVEGAEDEEEEESFPQPVDDYFVEPPQAEEEEETV

SEQ ID NO: 17088 - protein, 298 aa, Artificial Sequence
  Synthetic polypeptide
PGMVMYPELQIARVEQATQAIPMERWCGGSRSGSCAHPHHQVVPFRCLPGEFVSEALLVPEGCRFLHQERMDQCESSTRRHQEAQEACSSQGLILHGSGMLLPCGSDRFRGVEYVCCPPPGTPDPSGTAVGDPSTRSWPPGSRVEGAEDEEEEESFPQPVDDYFVEPPQAEEEEETVPPPSSHTLAVVGKVTPTPRPTDGVDIYFGMPGEISEHEGFLRAKMDLEERRMRQINEVMREWAMADNQSKNLPKADRQALNEHFQSILQTLEEQVSGERQRLVETHATRVIALINDQRRAA

SEQ ID NO: 17089 - protein, 558 aa, Artificial Sequence
  Synthetic polypeptide
PGMVMYPELQIARVEQATQAIPMERWCGGSRSGSCAHPHHQVVPFRCLPGEFVSEALLVPEGCRFLHQERMDQCESSTRRHQEAQEACSSQGLILHGSGMLLPCGSDRFRGVEYVCCPPPGTPDPSGTAVGDPSTRSWPPGSRVEGAEDEEEEESFPQPVDDYFVEPPQAEEEEETVPPPSSHTLAVVGKVTPTPRPTDGVDIYFGMPGEISEHEGFLRAKMDLEERRMRQINEVMREWAMADNQSKNLPKADRQALNEHFQSILQTLEEQVSGERQRLVETHATRVIALINDQRRAALEGFLAALQADPPQAERVLLALRRYLRAEQKEQRHTLRHYQHVAAVDPEKAQQMRFQVHTHLQVIEERVNQSLGLLDQNPHLAQELRPQIQELLHSEHLGPSELEAPAPGGSSEDKGGLQPPDSKDADTPMTLPKGSTEQDAASPEKEKMNPLEQYERKVNASVPRGFPFHSSEIQRDELAPAGTGVSREAVSGLLIMGAGGGSLIVLSMLLLRRKKPYGAISHGVVEVDPMLTLEEQQLRELQRHGYENPTYRFLEERP

SEQ ID NO: 17090 - protein, 557 aa, Artificial Sequence
  Synthetic polypeptide
PGMVMYPELQIARVEQATQAIPMERWCGGSRSGSCAHPHHQVVPFRCLPGEFVSEALLVPEGCRFLHQERMDQCESSTRRHQEAQEACSSQGLILHGSGMLLPCGSDRFRGVEYVCCPPPGTPDPSGTAVGDPSTRSWPPGSRVEGAEDEEEEESFPQPVDDYFVEPPQAEEEEETVPPPSSHTLAVVGKVTPTPRPTDGVDIYFGMPGEISEHEGFLRAKMDLEERRMRQINEVMREWAMADNQSKNLPKADRQALNEHFQSILQTLEEQVSGERQRLVETHATRVIALINDQRRAALEGFLAALQADPPQAERVLLALRRYLRAEQKEQRHTLRHYQHVAAVDPEKAQQMRFQVHTHLQVIEERVNQSLGLLDQNPHLAQELRPQIQELLHSEHLGPSELEAPAPGGSSEDKGGLQPPDSKDDTPMTLPKGSTEQDAASPEKEKMNPLEQYERKVNASVPRGFPFHSSEIQRDELAPAGTGVSREAVSGLLIMGAGGGSLIVLSMLLLRRKKPYGAISHGVVEVDPMLTLEEQQLRELQRHGYENPTYRFLEERP

SEQ ID NO: 17091 - protein, 86 aa, Artificial Sequence
  Synthetic polypeptide
SQHLGRPRQADHLRSEVRDQPGQHGETPSLLKIQKLAWHGDVPGAADCTCGAGYAGHPHGALVRGFPERQLRPPPPPGCALPLPAW

SEQ ID NO: 17092 - protein, 613 aa, Artificial Sequence
  Synthetic polypeptide
DPGPGLAQKKAAPTEVLSMTAQPGPGHGKKLGHRGVDASGETTYKKTTSSTLKGAIQLGIGYTVGHLSSKPERDVLMQDFYVVESIFFPSEGSNLTPAHHFQDFRFKTYAPVAFRYFRELFGIRPDDYLYSLCNEPLIELSNPGASGSLFYVTSDDEFIIKTVMHKEAEFLQKLLPGYYMNLNQNPRTLLPKFYGLYCVQSGGKNIRVVVMNNILPRVVKMHLKFDLKGSTYKRRASKKEKEKSFPTYKDLDFMQDMPEGLLLDADTFSALVKTLQRDCLVLESFKIMDYSLLLGVHNIDQHERERQAQGAQSTSDEKRPVGQKALYSTAMESIQGGAARGEAIESDDTMGGIPAVNGRGERLLLHIGIIDILQSYRFIKKLEHTWKALVHDGDTVSVHRPSFYAERFFKFMSNTVFRKNSSLKSSPSKKGRGGALLAVKPLGPTAAFSASQIPSEREEAQYDLRGARSYPTLEDEGRPDLLPCTPPSFEEATTASIATTLSSTSLSIPERSPSETSEQPRYRRRTQSSGQDGRPQEEPPAEEDLQQITVQVEPACSVEIVVPKEEDAGVEASPAGASAAVEVETASQASDEEGAPASQASDEEDAPATDIYF

SEQ ID NO: 17093 - protein, 680 aa, Artificial Sequence
  Synthetic polypeptide
DPGPGLAQKKAAPTEVLSMTAQPGPGHGKKLGHRGVDASGETTYKKTTSSTLKGAIQLGIGYTVGHLSSKPERDVLMQDFYVVESIFFPSEGSNLTPAHHFQDFRFKTYAPVAFRYFRELFGIRPDDYLYSLCNEPLIELSNPGASGSLFYVTSDDEFIIKTVMHKEAEFLQKLLPGYYMNLNQNPRTLLPKFYGLYCVQSGGKNIRVVVMNNILPRVVKMHLKFDLKGSTYKRRASKKEKEKSFPTYKDLDFMQDMPEGLLLDADTFSALVKTLQRDCLVLESFKIMDYSLLLGVHNIDQHERERQAQGAQSTSDEKRPVGQKALYSTAMESIQGGAARGEAIESDDTMGGIPAVNGRGERLLLHIGIIDILQSYRFIKKLEHTWKALVHDGDTVSVHRPSFYAERFFKFMSNTVFRKNSSLKSSPSKKGRGGALLAVKPLGPTAAFSASQIPSEREEAQYDLRGARSYPTLEDEGRPDLLPCTPPSFEEATTASIATTLSSTSLSIPERSPSETSEQPRYRRRTQSSGQDGRPQEEPPAEEDLQQITVQVEPACSVEIVVPKEEDAGVEASPAGASAAVEVETASQASDEEGAPASQASDEEDAPATDIYFFTDGRYWIYSPRHRRLRAVTLSASGTVSDRSRPPWGEGAVPLGQQGAAGPRPEAQCLTSVVFQKGFG

SEQ ID NO: 17094 - protein, 641 aa, Artificial Sequence
  Synthetic polypeptide
DPGPGLAQKKAAPTEVLSMTAQPGPGHGKKLGHRGVDASGETTYKKTTSSTLKGAIQLGIGYTVGHLSSKPERDVLMQDFYVVESIFFPSEGSNLTPAHHFQDFRFKTYAPVAFRYFRELFGIRPDDYLYSLCNEPLIELSNPGASGSLFYVTSDDEFIIKTVMHKEAEFLQKLLPGYYMNLNQNPRTLLPKFYGLYCVQSGGKNIRVVVMNNILPRVVKMHLKFDLKGSTYKRRASKKEKEKSFPTYKDLDFMQDMPEGLLLDADTFSALVKTLQRDCLVLESFKIMDYSLLLGVHNIDQHERERQAQGAQSTSDEKRPVGQKALYSTAMESIQGGAARGEAIESDDTMGGIPAVNGRGERLLLHIGIIDILQSYRFIKKLEHTWKALVHDGDTVSVHRPSFYAERFFKFMSNTVFRKNSSLKSSPSKKGRGGALLAVKPLGPTAAFSASQIPSEREEAQYDLRGARSYPTLEDEGRPDLLPCTPPSFEEATTASIATTLSSTSLSIPERSPSETSEQPRYRRRTQSSGQDGRPQEEPPAEEDLQQITVQVEPACSVEIVVPKEEDAGVEASPAGASAAVEVETASQASDEEGAPASQASDEEDAPATDIYFPTDERSWVYSPLHYSAQAPPASDGESDT

SEQ ID NO: 17095 - protein, 673 aa, Artificial Sequence
  Synthetic polypeptide
DPGPGLAQKKAAPTEVLSMTAQPGPGHGKKLGHRGVDASGETTYKKTTSSTLKGAIQLGIGYTVGHLSSKPERDVLMQDFYVVESIFFPSEGSNLTPAHHFQDFRFKTYAPVAFRYFRELFGIRPDDYLYSLCNEPLIELSNPGASGSLFYVTSDDEFIIKTVMHKEAEFLQKLLPGYYMNLNQNPRTLLPKFYGLYCVQSGGKNIRVVVMNNILPRVVKMHLKFDLKGSTYKRRASKKEKEKSFPTYKDLDFMQDMPEGLLLDADTFSALVKTLQRDCLVLESFKIMDYSLLLGVHNIDQHERERQAQGAQSTSDEKRPVGQKALYSTAMESIQGGAARGEAIESDDTMGGIPAVNGRGERLLLHIGIIDILQSYRFIKKLEHTWKALVHDGDTVSVHRPSFYAERFFKFMSNTVFRKNSSLKSSPSKKGRGGALLAVKPLGPTAAFSASQIPSEREEAQYDLRGARSYPTLEDEGRPDLLPCTPPSFEEATTASIATTLSSTSLSIPERSPSETSEQPRYRRRTQSSGQDGRPQEEPPAEEDLQQITVQVEPACSVEIVVPKEEDAGVEASPAGASAAVEVETASQASDEEGAPASQASDEEDAPATDIYFWRLWGPHAPTWPWRREGRAACLCPYPPHVVTPFPGTGLCASWSPDGTGGLGAMSCCVSVS

SEQ ID NO: 17096 - protein, 125 aa, Artificial Sequence
  Synthetic polypeptide
PRPRFGSEEGGPNRGSVHDGTAGPWPWEEVGPSRCGRIRRNHLQEDHLLHPEGCHPAGHRLHRGPPELQARTRRAHAGLLRGGEHLLPQRRQQPHPRPPLPGLPLQDLCTCRLPLLPGALWDPAR

SEQ ID NO: 17097 - protein, 18 aa, Artificial Sequence
  Synthetic polypeptide
TQAQVWLRRRRPQQRFCP

SEQ ID NO: 17098 - protein, 154 aa, Artificial Sequence
  Synthetic polypeptide
ARAPRGPRPSVPLLRHPLRPEELSTVQILVNIRFGSEEGGPNRGSVHDGTAGPWPWEEVGPSRCGRIRRNHLQEDHLLHPEGCHPAGHRLHRGPPELQARTRRAHAGLLRGGEHLLPQRRQQPHPRPPLPGLPLQDLCTCRLPLLPGALWDPAR

SEQ ID NO: 17099 - protein, 67 aa, Artificial Sequence
  Synthetic polypeptide
RLSPPETYGSADVFSDHLLLSESSTRAKTVCATPAASPAPGRAQHSADPGEHQVWLRRRRPQQRFCP

SEQ ID NO: 17100 - protein, 611 aa, Artificial Sequence
  Synthetic polypeptide
TSGLAQKKAAPTEVLSMTAQPGPGHGKKLGHRGVDASGETTYKKTTSSTLKGAIQLGIGYTVGHLSSKPERDVLMQDFYVVESIFFPSEGSNLTPAHHFQDFRFKTYAPVAFRYFRELFGIRPDDYLYSLCNEPLIELSNPGASGSLFYVTSDDEFIIKTVMHKEAEFLQKLLPGYYMNLNQNPRTLLPKFYGLYCVQSGGKNIRVVVMNNILPRVVKMHLKFDLKGSTYKRRASKKEKEKSFPTYKDLDFMQDMPEGLLLDADTFSALVKTLQRDCLVLESFKIMDYSLLLGVHNIDQHERERQAQGAQSTSDEKRPVGQKALYSTAMESIQGGAARGEAIESDDTMGGIPAVNGRGERLLLHIGIIDILQSYRFIKKLEHTWKALVHDGDTVSVHRPSFYAERFFKFMSNTVFRKNSSLKSSPSKKGRGGALLAVKPLGPTAAFSASQIPSEREEAQYDLRGARSYPTLEDEGRPDLLPCTPPSFEEATTASIATTLSSTSLSIPERSPSETSEQPRYRRRTQSSGQDGRPQEEPPAEEDLQQITVQVEPACSVEIVVPKEEDAGVEASPAGASAAVEVETASQASDEEGAPASQASDEEDAPATDIYF

SEQ ID NO: 17101 - protein, 678 aa, Artificial Sequence
  Synthetic polypeptide
TSGLAQKKAAPTEVLSMTAQPGPGHGKKLGHRGVDASGETTYKKTTSSTLKGAIQLGIGYTVGHLSSKPERDVLMQDFYVVESIFFPSEGSNLTPAHHFQDFRFKTYAPVAFRYFRELFGIRPDDYLYSLCNEPLIELSNPGASGSLFYVTSDDEFIIKTVMHKEAEFLQKLLPGYYMNLNQNPRTLLPKFYGLYCVQSGGKNIRVVVMNNILPRVVKMHLKFDLKGSTYKRRASKKEKEKSFPTYKDLDFMQDMPEGLLLDADTFSALVKTLQRDCLVLESFKIMDYSLLLGVHNIDQHERERQAQGAQSTSDEKRPVGQKALYSTAMESIQGGAARGEAIESDDTMGGIPAVNGRGERLLLHIGIIDILQSYRFIKKLEHTWKALVHDGDTVSVHRPSFYAERFFKFMSNTVFRKNSSLKSSPSKKGRGGALLAVKPLGPTAAFSASQIPSEREEAQYDLRGARSYPTLEDEGRPDLLPCTPPSFEEATTASIATTLSSTSLSIPERSPSETSEQPRYRRRTQSSGQDGRPQEEPPAEEDLQQITVQVEPACSVEIVVPKEEDAGVEASPAGASAAVEVETASQASDEEGAPASQASDEEDAPATDIYFFTDGRYWIYSPRHRRLRAVTLSASGTVSDRSRPPWGEGAVPLGQQGAAGPRPEAQCLTSVVFQKGFG

SEQ ID NO: 17102 - protein, 639 aa, Artificial Sequence
  Synthetic polypeptide
TSGLAQKKAAPTEVLSMTAQPGPGHGKKLGHRGVDASGETTYKKTTSSTLKGAIQLGIGYTVGHLSSKPERDVLMQDFYVVESIFFPSEGSNLTPAHHFQDFRFKTYAPVAFRYFRELFGIRPDDYLYSLCNEPLIELSNPGASGSLFYVTSDDEFIIKTVMHKEAEFLQKLLPGYYMNLNQNPRTLLPKFYGLYCVQSGGKNIRVVVMNNILPRVVKMHLKFDLKGSTYKRRASKKEKEKSFPTYKDLDFMQDMPEGLLLDADTFSALVKTLQRDCLVLESFKIMDYSLLLGVHNIDQHERERQAQGAQSTSDEKRPVGQKALYSTAMESIQGGAARGEAIESDDTMGGIPAVNGRGERLLLHIGIIDILQSYRFIKKLEHTWKALVHDGDTVSVHRPSFYAERFFKFMSNTVFRKNSSLKSSPSKKGRGGALLAVKPLGPTAAFSASQIPSEREEAQYDLRGARSYPTLEDEGRPDLLPCTPPSFEEATTASIATTLSSTSLSIPERSPSETSEQPRYRRRTQSSGQDGRPQEEPPAEEDLQQITVQVEPACSVEIVVPKEEDAGVEASPAGASAAVEVETASQASDEEGAPASQASDEEDAPATDIYFPTDERSWVYSPLHYSAQAPPASDGESDT

SEQ ID NO: 17103 - protein, 671 aa, Artificial Sequence
  Synthetic polypeptide
TSGLAQKKAAPTEVLSMTAQPGPGHGKKLGHRGVDASGETTYKKTTSSTLKGAIQLGIGYTVGHLSSKPERDVLMQDFYVVESIFFPSEGSNLTPAHHFQDFRFKTYAPVAFRYFRELFGIRPDDYLYSLCNEPLIELSNPGASGSLFYVTSDDEFIIKTVMHKEAEFLQKLLPGYYMNLNQNPRTLLPKFYGLYCVQSGGKNIRVVVMNNILPRVVKMHLKFDLKGSTYKRRASKKEKEKSFPTYKDLDFMQDMPEGLLLDADTFSALVKTLQRDCLVLESFKIMDYSLLLGVHNIDQHERERQAQGAQSTSDEKRPVGQKALYSTAMESIQGGAARGEAIESDDTMGGIPAVNGRGERLLLHIGIIDILQSYRFIKKLEHTWKALVHDGDTVSVHRPSFYAERFFKFMSNTVFRKNSSLKSSPSKKGRGGALLAVKPLGPTAAFSASQIPSEREEAQYDLRGARSYPTLEDEGRPDLLPCTPPSFEEATTASIATTLSSTSLSIPERSPSETSEQPRYRRRTQSSGQDGRPQEEPPAEEDLQQITVQVEPACSVEIVVPKEEDAGVEASPAGASAAVEVETASQASDEEGAPASQASDEEDAPATDIYFWRLWGPHAPTWPWRREGRAACLCPYPPHVVTPFPGTGLCASWSPDGTGGLGAMSCCVSVS

SEQ ID NO: 17104 - protein, 934 aa, Artificial Sequence
  Synthetic polypeptide
LTPVIPALWEAEVADMEELTIWEQHTATLSKDPRRGFGIAISGGRDRPGGSMVVSDVVPGGPAEGRLQTGDHIVMVNGVSMENATSAFAIQILKTCTKMANITVKRPRRIHLPATKASPSSPGRQDSDEDDGPQRVEEVDQGRGYDGDSSSGSGRSWDERSRRPRPGRRGRAGSHGRRSPGGGSEANGLALVSGFKRLPRQDVQMKPVKSVLVKRRDSEEFGVKLGSQIFIKHITDSGLAARHRGLQEGDLILQINGVSSQNLSLNDTRRLIEKSEGKLSLLVLRDRGQFLVNIPPAVSDSDSSPLEDISDLASELSQAPPSHIPPPPRHAQRSPEASQTDSPVESPRLRRESSVDSRTISEPDEQRSELPRESSYDIYRVPSSQSMEDRGYSPDTRVVRFLKGKSIGLRLAGGNDVGIFVSGVQAGSPADGQGIQEGDQILQVNDVPFQNLTREEAVQFLLGLPPGEEMELVTQRKQDIFWKMVQSRVGDSFYIRTHFELEPSPPSGLGFTRGDVFHVLDTLHPGPGQSHARGGHWLAVRMGRDLREQERGIIPNQSRAEQLASLEAAQRAVGVGPGSSAGSNARAEFWRLRGLRRGAKKTTQRSREDLSALTRQGRYPPYERVVLREASFKRPVVILGPVADIAMQKLTAEMPDQFEIAETVSRTDSPSKIIKLDTVRVIAEKDKHALLDVTPSAIERLNYVQYYPIVVFFIPESRPALKALRQWLAPASRRSTRRLYAQAQKLRKHSSHLFTATIPLNGTSDTWYQELKAIIREQQTRPIWTAEDQLDGSLEDNLDLPHHGLADSSADLSCDSRVNSDYETDGEGGAYTDGEGYTDGEGGPYTDVDDEPPAPALARSSEPVQADESQSPRDRGRISAHQGAQVDSRHPQGQWRQDSMRTYEREALKKKFMRVHDAESSDEDGYDWGPATDL

SEQ ID NO: 17105 - protein, 948 aa, Artificial Sequence
  Synthetic polypeptide
LTPVIPALWEAEVADMEELTIWEQHTATLSKDPRRGFGIAISGGRDRPGGSMVVSDVVPGGPAEGRLQTGDHIVMVNGVSMENATSAFAIQILKTCTKMANITVKRPRRIHLPATKASPSSPGRQDSDEDDGPQRVEEVDQGRGYDGDSSSGSGRSWDERSRRPRPGRRGRAGSHGRRSPGGGSEANGLALVSGFKRLPRQDVQMKPVKSVLVKRRDSEEFGVKLGSQIFIKHITDSGLAARHRGLQEGDLILQINGVSSQNLSLNDTRRLIEKSEGKLSLLVLRDRGQFLVNIPPAVSDSDSSPLEEGVTMADEMSSPPADISDLASELSQAPPSHIPPPPRHAQRSPEASQTDSPVESPRLRRESSVDSRTISEPDEQRSELPRESSYDIYRVPSSQSMEDRGYSPDTRVVRFLKGKSIGLRLAGGNDVGIFVSGVQAGSPADGQGIQEGDQILQVNDVPFQNLTREEAVQFLLGLPPGEEMELVTQRKQDIFWKMVQSRVGDSFYIRTHFELEPSPPSGLGFTRGDVFHVLDTLHPGPGQSHARGGHWLAVRMGRDLREQERGIIPNQSRAEQLASLEAAQRAVGVGPGSSAGSNARAEFWRLRGLRRGAKKTTQRSREDLSALTRQGRYPPYERVVLREASFKRPVVILGPVADIAMQKLTAEMPDQFEIAETVSRTDSPSKIIKLDTVRVIAEKDKHALLDVTPSAIERLNYVQYYPIVVFFIPESRPALKALRQWLAPASRRSTRRLYAQAQKLRKHSSHLFTATIPLNGTSDTWYQELKAIIREQQTRPIWTAEDQLDGSLEDNLDLPHHGLADSSADLSCDSRVNSDYETDGEGGAYTDGEGYTDGEGGPYTDVDDEPPAPALARSSEPVQADESQSPRDRGRISAHQGAQVDSRHPQGQWRQDSMRTYEREALKKKFMRVHDAESSDEDGYDWGPATDL

SEQ ID NO: 17106 - protein, 18 aa, Artificial Sequence
  Synthetic polypeptide
MGTVTHPCNPSTLGGRGG

SEQ ID NO: 17107 - protein, 14 aa, Artificial Sequence
  Synthetic polypeptide
SQHFGRPRWLTWRS

SEQ ID NO: 17108 - protein, 54 aa, Artificial Sequence
  Synthetic polypeptide
GPAWWLTPIIPTLWEAEVGGSLRPGVPDQPGRQFQAPGSDPGTRGRHCYAEVDC

SEQ ID NO: 17109 - protein, 314 aa, Artificial Sequence
  Synthetic polypeptide
GQEFQINLGASFKRPVVILGPVADIAMQKLTAEMPDQFEIAETVSRTDSPSKIIKLDTVRVIAEKDKHALLDVTPSAIERLNYVQYYPIVVFFIPESRPALKALRQWLAPASRRSTRRLYAQAQKLRKHSSHLFTATIPLNGTSDTWYQELKAIIREQQTRPIWTAEDQLDGSLEDNLDLPHHGLADSSADLSCDSRVNSDYETDGEGGAYTDGEGYTDGEGGPYTDVDDEPPAPALARSSEPVQADESQSPRDRGRISAHQGAQVDSRHPQGQWRQDSMRTYEREALKKKFMRVHDAESSDEDGYDWGPATDL

SEQ ID NO: 17110 - protein, 37 aa, Artificial Sequence
  Synthetic polypeptide
PGVVAHAYNPNTLGGRGRRIAEARSSRSTWAPVSSAR

SEQ ID NO: 17111 - protein, 33 aa, Artificial Sequence
  Synthetic polypeptide
GRARWLTLVIPALWEAKNMPITSAWMRSWGQWL

SEQ ID NO: 17112 - protein, 60 aa, Artificial Sequence
  Synthetic polypeptide
PGTVAHACNPSTLGGQEHANYFGVDEKLGPVAVSIKREKLEDHKEHGPQYQYRIIFRTRE

SEQ ID NO: 17113 - protein, 1286 aa, Artificial Sequence
  Synthetic polypeptide
PGTVAHACNPSTLGGQEHANYFGVDEKLGPVAVSIKREKLEDHKEHGPQYQYRIIFRTRELITLRGSILEDATPTATKHGTGRGLPLKDALEYVIPELNIHCLRLALNTPKVTEQLLKLDEQGLCRKHKVGILYCKAGQSSEEEMYNNEEAGPAFEEFLSLIGEKVCLKGFTKYAAQLDVKTDSTGTHSLYTMYQDYEIMFHVSTLLPYTPNNRQQLLRKRHIGNDIVTIIFQEPGALPFTPKNIRSHFQHVFIIVRVHNPCTDNVCYSMAVTRSKDAPPFGPPIPSGTTFRKSDVFRDFLLAKVINAENAAHKSDKFHTMATRTRQEYLKDLAENCVSNTPIDSTGKFNLISLTSKKKEKTKARAGAEQHSAGAIAWRVVAQDYAQGVEIDCILGISNEFVVLLDLRTKEVVFNCYCGDVIGWTPDSSTLKIFYGRGDHIFLQATEGSVEDIREIVQRLKVMTSGWETVDMTLRRNGLGQLGFHVKYDGTVAEVEDYGFAWQAGLRQGSRLVEICKVAVVTLTHDQMIDLLRTSVTVKVVIIPPFEDGTPRRGWPETYDMNTSEPKTEQESITPGGRPPYRSNAPWQWSGPASHNSLPASKWATPTTPGHAQSLSRPLKQTPIVPFRESQPLHSKRPVSFPETPYTVSPAGADRVPPYRQPSGSFSTPGSATYVRYKPSPERYTAAPHPLLSLDPHFSHDGTSSGDSSSGGLTSQESTMERQKPEPLWHVPAQARLSAIAGSSGNKHPSRQDAAGKDSPNRHSKGEPQYSSHSSSNTLSSNASSSHSDDRWFDPLDPLEPEQDPLSKGGSSDSGIDTTLYTSSPSCMSLAKAPRPAKPHKPPGSMGLCGGGREAAGRSHHADRRREVSPAPAVAGQSKGYRPKLYSSGSSTPTGLAGGSRDPPRQPSDMGSRVGYPAQVYKTASAETPRPSQLAQPSPFQLSASVPKSFFSKQPVRNKHPTGWKRTEEPPPRPLPFSDPKKQVDTNTKNVFGQPRLRASLRDLRSPRKNYKSTIEDDLKKLIIMDNLGPEQERDTGQSPQKGLQRTLSDESLCSGRREPSFASPAGLEPGLPSDVLFTSTCAFPSSTLPARRQHQHPHPPVGPGATPAAGSGFPEKKSTISASELSLADGRDRPLRRLDPGLMPLPDTAAGLEWSSLVNAAKAYEVQRAVSLFSLNDPALSPDIPPAHSPVHSHLSLERGPPTPRTTPTMSEEPPLDLTGKVYQLEVMLKQLHTDLQKEKQDKVVLQSEVASLRQNNQRLQEESQAASEQLRKFAEIFCREKKEL

SEQ ID NO: 17114 - protein, 16 aa, Artificial Sequence
  Synthetic polypeptide
SQHFGRPRTCQLLRRG

SEQ ID NO: 17115 - protein, 50 aa, Artificial Sequence
  Synthetic polypeptide
LSSCTPSRLHGNPLPLHDVPGLRDHVPCLHPAPLHPQQQAAAATEEAHRK

SEQ ID NO: 17116 - protein, 1133 aa, Artificial Sequence
  Synthetic polypeptide
VQPLWKTVQHIQVQFEETLLCDSAPALLADSTGTHSLYTMYQDYEIMFHVSTLLPYTPNNRQQLLRKRHIGNDIVTIIFQEPGALPFTPKNIRSHFQHVFIIVRVHNPCTDNVCYSMAVTRSKDAPPFGPPIPSGTTFRKSDVFRDFLLAKVINAENAAHKSDKFHTMATRTRQEYLKDLAENCVSNTPIDSTGKFNLISLTSKKKEKTKARAGAEQHSAGAIAWRVVAQDYAQGVEIDCILGISNEFVVLLDLRTKEVVFNCYCGDVIGWTPDSSTLKIFYGRGDHIFLQATEGSVEDIREIVQRLKVMTSGWETVDMTLRRNGLGQLGFHVKYDGTVAEVEDYGFAWQAGLRQGSRLVEICKVAVVTLTHDQMIDLLRTSVTVKVVIIPPFEDGTPRRGWPETYDMNTSEPKTEQESITPGGRPPYRSNAPWQWSGPASHNSLPASKWATPTTPGHAQSLSRPLKQTPIVPFRESQPLHSKRPVSFPETPYTVSPAGADRVPPYRQPSGSFSTPGSATYVRYKPSPERYTAAPHPLLSLDPHFSHDGTSSGDSSSGGLTSQESTMERQKPEPLWHVPAQARLSAIAGSSGNKHPSRQDAAGKDSPNRHSKGEPQYSSHSSSNTLSSNASSSHSDDRWFDPLDPLEPEQDPLSKGGSSDSGIDTTLYTSSPSCMSLAKAPRPAKPHKPPGSMGLCGGGREAAGRSHHADRRREVSPAPAVAGQSKGYRPKLYSSGSSTPTGLAGGSRDPPRQPSDMGSRVGYPAQVYKTASAETPRPSQLAQPSPFQLSASVPKSFFSKQPVRNKHPTGWKRTEEPPPRPLPFSDPKKQVDTNTKNVFGQPRLRASLRDLRSPRKNYKSTIEDDLKKLIIMDNLGPEQERDTGQSPQKGLQRTLSDESLCSGRREPSFASPAGLEPGLPSDVLFTSTCAFPSSTLPARRQHQHPHPPVGPGATPAAGSGFPEKKSTISASELSLADGRDRPLRRLDPGLMPLPDTAAGLEWSSLVNAAKAYEVQRAVSLFSLNDPALSPDIPPAHSPVHSHLSLERGPPTPRTTPTMSEEPPLDLTGKVYQLEVMLKQLHTDLQKEKQDKVVLQSEVASLRQNNQRLQEESQAASEQLRKFAEIFCREKKEL

SEQ ID NO: 17117 - protein, 1143 aa, Artificial Sequence
  Synthetic polypeptide
DLESNSLSTGPDATTQYSVTLGRHSLSMPQFPTLKHGLTDSTGTHSLYTMYQDYEIMFHVSTLLPYTPNNRQQLLRKRHIGNDIVTIIFQEPGALPFTPKNIRSHFQHVFIIVRVHNPCTDNVCYSMAVTRSKDAPPFGPPIPSGTTFRKSDVFRDFLLAKVINAENAAHKSDKFHTMATRTRQEYLKDLAENCVSNTPIDSTGKFNLISLTSKKKEKTKARAGAEQHSAGAIAWRVVAQDYAQGVEIDCILGISNEFVVLLDLRTKEVVFNCYCGDVIGWTPDSSTLKIFYGRGDHIFLQATEGSVEDIREIVQRLKVMTSGWETVDMTLRRNGLGQLGFHVKYDGTVAEVEDYGFAWQAGLRQGSRLVEICKVAVVTLTHDQMIDLLRTSVTVKVVIIPPFEDGTPRRGWPETYDMNTSEPKTEQESITPGGRPPYRSNAPWQWSGPASHNSLPASKWATPTTPGHAQSLSRPLKQTPIVPFRESQPLHSKRPVSFPETPYTVSPAGADRVPPYRQPSGSFSTPGSATYVRYKPSPERYTAAPHPLLSLDPHFSHDGTSSGDSSSGGLTSQESTMERQKPEPLWHVPAQARLSAIAGSSGNKHPSRQDAAGKDSPNRHSKGEPQYSSHSSSNTLSSNASSSHSDDRWFDPLDPLEPEQDPLSKGGSSDSGIDTTLYTSSPSCMSLAKAPRPAKPHKPPGSMGLCGGGREAAGRSHHADRRREVSPAPAVAGQSKGYRPKLYSSGSSTPTGLAGGSRDPPRQPSDMGSRVGYPAQVYKTASAETPRPSQLAQPSPFQLSASVPKSFFSKQPVRNKHPTGWKRTEEPPPRPLPFSDPKKQVDTNTKNVFGQPRLRASLRDLRSPRKNYKSTIEDDLKKLIIMDNLGPEQERDTGQSPQKGLQRTLSDESLCSGRREPSFASPAGLEPGLPSDVLFTSTCAFPSSTLPARRQHQHPHPPVGPGATPAAGSGFPEKKSTISASELSLADGRDRPLRRLDPGLMPLPDTAAGLEWSSLVNAAKAYEVQRAVSLFSLNDPALSPDIPPAHSPVHSHLSLERGPPTPRTTPTMSEEPPLDLTGKVYQLEVMLKQLHTDLQKEKQDKVVLQSEVASLRQNNQRLQEESQAASEQLRKFAEIFCREKKEL

SEQ ID NO: 17118 - protein, 45 aa, Artificial Sequence
  Synthetic polypeptide
NMGSPTPREPTPSTRCTRTTRSCSMSPPCSLTPPTTGSSCYGRGT

SEQ ID NO: 17119 - protein, 82 aa, Artificial Sequence
  Synthetic polypeptide
RSGIQQPEYWSRRYHSVQCDLGKALPLHASVSHSETWAHRLHGNPLPLHDVPGLRDHVPCLHPAPLHPQQQAAAATEEAHRK

SEQ ID NO: 17120 - protein, 54 aa, Artificial Sequence
  Synthetic polypeptide
GEVQWLTLVIPALWEAEYGCDPIQRRSSFRPPHPQWNHIPQIRRLQRLLAGQGD

SEQ ID NO: 17121 - protein, 1025 aa, Artificial Sequence
  Synthetic polypeptide
SQHFGRLSMAVTRSKDAPPFGPPIPSGTTFRKSDVFRDFLLAKVINAENAAHKSDKFHTMATRTRQEYLKDLAENCVSNTPIDSTGKFNLISLTSKKKEKTKARAGAEQHSAGAIAWRVVAQDYAQGVEIDCILGISNEFVVLLDLRTKEVVFNCYCGDVIGWTPDSSTLKIFYGRGDHIFLQATEGSVEDIREIVQRLKVMTSGWETVDMTLRRNGLGQLGFHVKYDGTVAEVEDYGFAWQAGLRQGSRLVEICKVAVVTLTHDQMIDLLRTSVTVKVVIIPPFEDGTPRRGWPETYDMNTSEPKTEQESITPGGRPPYRSNAPWQWSGPASHNSLPASKWATPTTPGHAQSLSRPLKQTPIVPFRESQPLHSKRPVSFPETPYTVSPAGADRVPPYRQPSGSFSTPGSATYVRYKPSPERYTAAPHPLLSLDPHFSHDGTSSGDSSSGGLTSQESTMERQKPEPLWHVPAQARLSAIAGSSGNKHPSRQDAAGKDSPNRHSKGEPQYSSHSSSNTLSSNASSSHSDDRWFDPLDPLEPEQDPLSKGGSSDSGIDTTLYTSSPSCMSLAKAPRPAKPHKPPGSMGLCGGGREAAGRSHHADRRREVSPAPAVAGQSKGYRPKLYSSGSSTPTGLAGGSRDPPRQPSDMGSRVGYPAQVYKTASAETPRPSQLAQPSPFQLSASVPKSFFSKQPVRNKHPTGWKRTEEPPPRPLPFSDPKKQVDTNTKNVFGQPRLRASLRDLRSPRKNYKSTIEDDLKKLIIMDNLGPEQERDTGQSPQKGLQRTLSDESLCSGRREPSFASPAGLEPGLPSDVLFTSTCAFPSSTLPARRQHQHPHPPVGPGATPAAGSGFPEKKSTISASELSLADGRDRPLRRLDPGLMPLPDTAAGLEWSSLVNAAKAYEVQRAVSLFSLNDPALSPDIPPAHSPVHSHLSLERGPPTPRTTPTMSEEPPLDLTGKVYQLEVMLKQLHTDLQKEKQDKVVLQSEVASLRQNNQRLQEESQAASEQLRKFAEIFCREKKEL

SEQ ID NO: 17122 - protein, 3 aa, Artificial Sequence
  Synthetic polypeptide
VWL

SEQ ID NO: 17123 - protein, 836 aa, Artificial Sequence
  Synthetic polypeptide
GQEFETSLANMVMTSGWETVDMTLRRNGLGQLGFHVKYDGTVAEVEDYGFAWQAGLRQGSRLVEICKVAVVTLTHDQMIDLLRTSVTVKVVIIPPFEDGTPRRGWPETYDMNTSEPKTEQESITPGGRPPYRSNAPWQWSGPASHNSLPASKWATPTTPGHAQSLSRPLKQTPIVPFRESQPLHSKRPVSFPETPYTVSPAGADRVPPYRQPSGSFSTPGSATYVRYKPSPERYTAAPHPLLSLDPHFSHDGTSSGDSSSGGLTSQESTMERQKPEPLWHVPAQARLSAIAGSSGNKHPSRQDAAGKDSPNRHSKGEPQYSSHSSSNTLSSNASSSHSDDRWFDPLDPLEPEQDPLSKGGSSDSGIDTTLYTSSPSCMSLAKAPRPAKPHKPPGSMGLCGGGREAAGRSHHADRRREVSPAPAVAGQSKGYRPKLYSSGSSTPTGLAGGSRDPPRQPSDMGSRVGYPAQVYKTASAETPRPSQLAQPSPFQLSASVPKSFFSKQPVRNKHPTGWKRTEEPPPRPLPFSDPKKQVDTNTKNVFGQPRLRASLRDLRSPRKNYKSTIEDDLKKLIIMDNLGPEQERDTGQSPQKGLQRTLSDESLCSGRREPSFASPAGLEPGLPSDVLFTSTCAFPSSTLPARRQHQHPHPPVGPGATPAAGSGFPEKKSTISASELSLADGRDRPLRRLDPGLMPLPDTAAGLEWSSLVNAAKAYEVQRAVSLFSLNDPALSPDIPPAHSPVHSHLSLERGPPTPRTTPTMSEEPPLDLTGKVYQLEVMLKQLHTDLQKEKQDKVVLQSEVASLRQNNQRLQEESQAASEQLRKFAEIFCREKKEL

SEQ ID NO: 17124 - protein, 130 aa, Artificial Sequence
  Synthetic polypeptide
GQEFETSLANMVMTSGWETVDMTLRRNGLGQLGFHVKYDGTVAEVEDYGFAWQAGLRQGSRLVEICKVAVVTLTHDQMIDLLRTSVTVKVVIIPPFEDGTPRRWSLALSPRLKCSGVISTHCNLHLPGSS

SEQ ID NO: 17125 - protein, 34 aa, Artificial Sequence
  Synthetic polypeptide
GRAQWLTPVIPALWEAETGESLEVRSSRPAWPTW

SEQ ID NO: 17126 - protein, 58 aa, Artificial Sequence
  Synthetic polypeptide
SQHFGRPRQVNHLRSGVRDQPGQHGDDQWLGDGGHDASAERARAAGLPREVRRHGGRG

SEQ ID NO: 17127 - protein, 42 aa, Artificial Sequence
  Synthetic polypeptide
GPPLCSLNLPGTLLPQGFSTGCSVCLECSSPSHHLSLGALAG

SEQ ID NO: 17128 - protein, 37 aa, Artificial Sequence
  Synthetic polypeptide
HWLFRLPGMFLPQPPSQPRSSRWLMGGTAPCGAWTLG

SEQ ID NO: 17129 - protein, 192 aa, Artificial Sequence
  Synthetic polypeptide
TFQAHSCLRDLALAVPSAWNVPPPATISASELSLADGRDRPLRRLDPGLMPLPDTAAGLEWSSLVNAAKAYEVQRAVSLFSLNDPALSPDIPPAHSPVHSHLSLERGPPTPRTTPTMSEEPPLDLTGKVYQLEVMLKQLHTDLQKEKQDKVVLQSEVASLRQNNQRLQEESQAASEQLRKFAEIFCREKKEL

SEQ ID NO: 17130 - protein, 87 aa, Artificial Sequence
  Synthetic polypeptide
GLSWACLPLDLFSPFPCSPSLLAGQAGLSCGEMQSGREGEARAFAHTQPHASPPCGSSFCQPGLGVPNWWQVPPILCFECQLMKTER

SEQ ID NO: 17131 - protein, 115 aa, Artificial Sequence
  Synthetic polypeptide
GLSWACLPLDLFSPFPCSPSLLAGQAGLSCGEMQSGREGEARAFAHTQPHASPPCGSSFCQPGLGVPNWWQVPPILCFECQLMKTERPRPNTFVIRCLQWTTVIERTFHVDSPDE

SEQ ID NO: 17132 - protein, 116 aa, Artificial Sequence
  Synthetic polypeptide
GLSWACLPLDLFSPFPCSPSLLAGQAGLSCGEMQSGREGEARAFAHTQPHASPPCGSSFCQPGLGVPNWWQVPPILCFECQLMKTERPRPNTFVIRCLQWTTVIERTFHVDSPDER

SEQ ID NO: 17133 - protein, 119 aa, Artificial Sequence
  Synthetic polypeptide
GLSWACLPLDLFSPFPCSPSLLAGQAGLSCGEMQSGREGEARAFAHTQPHASPPCGSSFCQPGLGVPNWWQVPPILCFECQLMKTERPRPNTFVIRCLQWTTVIERTFHVDSPDEREEW

SEQ ID NO: 17134 - protein, 127 aa, Artificial Sequence
  Synthetic polypeptide
GLSWACLPLDLFSPFPCSPSLLAGQAGLSCGEMQSGREGEARAFAHTQPHASPPCGSSFCQPGLGVPNWWQVPPILCFECQLMKTERPRPNTFVIRCLQWTTVIERTFHVDSPDEREEWMRAIQMVA

SEQ ID NO: 17135 - protein, 135 aa, Artificial Sequence
  Synthetic polypeptide
GLSWACLPLDLFSPFPCSPSLLAGQAGLSCGEMQSGREGEARAFAHTQPHASPPCGSSFCQPGLGVPNWWQVPPILCFECQLMKTERPRPNTFVIRCLQWTTVIERTFHVDSPDEREEWMRAIQMVANSLKQRAP

SEQ ID NO: 17136 - protein, 139 aa, Artificial Sequence
  Synthetic polypeptide
GLSWACLPLDLFSPFPCSPSLLAGQAGLSCGEMQSGREGEARAFAHTQPHASPPCGSSFCQPGLGVPNWWQVPPILCFECQLMKTERPRPNTFVIRCLQWTTVIERTFHVDSPDEREEWMRAIQMVANSLKQRAPGEDP

SEQ ID NO: 17137 - protein, 150 aa, Artificial Sequence
  Synthetic polypeptide
GLSWACLPLDLFSPFPCSPSLLAGQAGLSCGEMQSGREGEARAFAHTQPHASPPCGSSFCQPGLGVPNWWQVPPILCFECQLMKTERPRPNTFVIRCLQWTTVIERTFHVDSPDEREEWMRAIQMVANSLKQRAPGEDPMDYKCGSPSDS

SEQ ID NO: 17138 - protein, 152 aa, Artificial Sequence
  Synthetic polypeptide
GLSWACLPLDLFSPFPCSPSLLAGQAGLSCGEMQSGREGEARAFAHTQPHASPPCGSSFCQPGLGVPNWWQVPPILCFECQLMKTERPRPNTFVIRCLQWTTVIERTFHVDSPDEREEWMRAIQMVANSLKQRAPGEDPMDYKCGSPSDSST

SEQ ID NO: 17139 - protein, 153 aa, Artificial Sequence
  Synthetic polypeptide
GLSWACLPLDLFSPFPCSPSLLAGQAGLSCGEMQSGREGEARAFAHTQPHASPPCGSSFCQPGLGVPNWWQVPPILCFECQLMKTERPRPNTFVIRCLQWTTVIERTFHVDSPDEREEWMRAIQMVANSLKQRAPGEDPMDYKCGSPSDSSTT

SEQ ID NO: 17140 - protein, 154 aa, Artificial Sequence
  Synthetic polypeptide
GLSWACLPLDLFSPFPCSPSLLAGQAGLSCGEMQSGREGEARAFAHTQPHASPPCGSSFCQPGLGVPNWWQVPPILCFECQLMKTERPRPNTFVIRCLQWTTVIERTFHVDSPDEREEWMRAIQMVANSLKQRAPGEDPMDYKCGSPSDSSTTE

SEQ ID NO: 17141 - protein, 171 aa, Artificial Sequence
  Synthetic polypeptide
GLSWACLPLDLFSPFPCSPSLLAGQAGLSCGEMQSGREGEARAFAHTQPHASPPCGSSFCQPGLGVPNWWQVPPILCFECQLMKTERPRPNTFVIRCLQWTTVIERTFHVDSPDEREEWMRAIQMVANSLKQRAPGEDPMDYKCGSPSDSSTTEEMEVAVSKARAKVTMND

SEQ ID NO: 17142 - protein, 177 aa, Artificial Sequence
  Synthetic polypeptide
GLSWACLPLDLFSPFPCSPSLLAGQAGLSCGEMQSGREGEARAFAHTQPHASPPCGSSFCQPGLGVPNWWQVPPILCFECQLMKTERPRPNTFVIRCLQWTTVIERTFHVDSPDEREEWMRAIQMVANSLKQRAPGEDPMDYKCGSPSDSSTTEEMEVAVSKARAKVTMNDFDYLKL

SEQ ID NO: 17143 - protein, 204 aa, Artificial Sequence
  Synthetic polypeptide
GLSWACLPLDLFSPFPCSPSLLAGQAGLSCGEMQSGREGEARAFAHTQPHASPPCGSSFCQPGLGVPNWWQVPPILCFECQLMKTERPRPNTFVIRCLQWTTVIERTFHVDSPDEREEWMRAIQMVANSLKQRAPGEDPMDYKCGSPSDSSTTEEMEVAVSKARAKVTMNDFDYLKLLGKGTFGKVILVREKATGRYYAMKILR

SEQ ID NO: 17144 - protein, 501 aa, Artificial Sequence
  Synthetic polypeptide
GLSWACLPLDLFSPFPCSPSLLAGQAGLSCGEMQSGREGEARAFAHTQPHASPPCGSSFCQPGLGVPNWWQVPPILCFECQLMKTERPRPNTFVIRCLQWTTVIERTFHVDSPDEREEWMRAIQMVANSLKQRAPGEDPMDYKCGSPSDSSTTEEMEVAVSKARAKVTMNDFDYLKLLGKGTFGKVILVREKATGRYYAMKILRKEVIIAKDEVAHTVTESRVLQNTRHPFLTALKYAFQTHDRLCFVMEYANGGELFFHLSRERVFTEERARFYGAEIVSALEYLHSRDVVYRDIKLENLMLDKDGHIKITDFGLCKEGISDGATMKTFCGTPEYLAPEVLEDNDYGRAVDWWGLGVVMYEMMCGRLPFYNQDHERLFELILMEEIRFPRTLSPEAKSLLAGLLKKDPKQRLGGGPSDAKEVMEHRFFLSINWQDVVQKKLLPPFKPQVTSEVDTRYFDDEFTAQSITITPPDRYDSLGLLELDQRTHFPQFSYSASIRE

SEQ ID NO: 17145 - protein, 458 aa, Artificial Sequence
  Synthetic polypeptide
GLSWACLPLDLFSPFPCSPSLLAGQAGLSCGEMQSGREGEARAFAHTQPHASPPCGSSFCQPGLGVPNWWQVPPILCFECQLMKTERPRPNTFVIRCLQWTTVIERTFHVDSPDEREEWMRAIQMVANSLKQRAPGEDPMDYKCGSPSDSSTTEEMEVAVSKARAKVTMNDFDYLKLLGKGTFGKVILVREKATGRYYAMKILRKEVIIAKDEVAHTVTESRVLQNTRHPFLTALKYAFQTHDRLCFVMEYANGGELFFHLSRERVFTEERARFYGAEIVSALEYLHSRDVVYRDIKVLEDNDYGRAVDWWGLGVVMYEMMCGRLPFYNQDHERLFELILMEEIRFPRTLSPEAKSLLAGLLKKDPKQRLGGGPSDAKEVMEHRFFLSINWQDVVQKKLLPPFKPQVTSEVDTRYFDDEFTAQSITITPPDRYDSLGLLELDQRTHFPQFSYSASIRE

SEQ ID NO: 17146 - protein, 116 aa, Artificial Sequence
  Synthetic polypeptide
GLSWACLPLDLFSPFPCSPSLLAGQAGLSCGEMQSGREGEARAFAHTQPHASPPCGSSFCQPGLGVPNWWQVPPILCFECQLMKTERPRPNTFVIRCLQWTTVIERTFHVDSPDES

SEQ ID NO: 17147 - protein, 59 aa, Artificial Sequence
  Synthetic polypeptide
LARRGCPAGRCRVGGREKPGHLPTPSPMHRLLVVPASVSQALESPTGGRCLPSCALNAS

SEQ ID NO: 17148 - protein, 116 aa, Artificial Sequence
  Synthetic polypeptide
CCQLYKGEYIKTWRPRYFLLKSDGSFIGYKERPEAPDQTLPPLNNFSVAAPCCLFPLPAECQLMKTERPRPNTFVIRCLQWTTVIERTFHVDSPDEREEWMRAIQMVANSLKQRAP

SEQ ID NO: 17149 - protein, 58 aa, Artificial Sequence
  Synthetic polypeptide
CCQLYKGEYIKTWRPRYFLLKSDGSFIGYKERPEAPDQTLPPLNNFSVAECQLMKTER

SEQ ID NO: 17150 - protein, 86 aa, Artificial Sequence
  Synthetic polypeptide
CCQLYKGEYIKTWRPRYFLLKSDGSFIGYKERPEAPDQTLPPLNNFSVAECQLMKTERPRPNTFVIRCLQWTTVIERTFHVDSPDE

SEQ ID NO: 17151 - protein, 87 aa, Artificial Sequence
  Synthetic polypeptide
CCQLYKGEYIKTWRPRYFLLKSDGSFIGYKERPEAPDQTLPPLNNFSVAECQLMKTERPRPNTFVIRCLQWTTVIERTFHVDSPDER

SEQ ID NO: 17152 - protein, 90 aa, Artificial Sequence
  Synthetic polypeptide
CCQLYKGEYIKTWRPRYFLLKSDGSFIGYKERPEAPDQTLPPLNNFSVAECQLMKTERPRPNTFVIRCLQWTTVIERTFHVDSPDEREEW

SEQ ID NO: 17153 - protein, 98 aa, Artificial Sequence
  Synthetic polypeptide
CCQLYKGEYIKTWRPRYFLLKSDGSFIGYKERPEAPDQTLPPLNNFSVAECQLMKTERPRPNTFVIRCLQWTTVIERTFHVDSPDEREEWMRAIQMVA

SEQ ID NO: 17154 - protein, 110 aa, Artificial Sequence
  Synthetic polypeptide
CCQLYKGEYIKTWRPRYFLLKSDGSFIGYKERPEAPDQTLPPLNNFSVAECQLMKTERPRPNTFVIRCLQWTTVIERTFHVDSPDEREEWMRAIQMVANSLKQRAPGEDP

SEQ ID NO: 17155 - protein, 121 aa, Artificial Sequence
  Synthetic polypeptide
CCQLYKGEYIKTWRPRYFLLKSDGSFIGYKERPEAPDQTLPPLNNFSVAECQLMKTERPRPNTFVIRCLQWTTVIERTFHVDSPDEREEWMRAIQMVANSLKQRAPGEDPMDYKCGSPSDS

SEQ ID NO: 17156 - protein, 123 aa, Artificial Sequence
  Synthetic polypeptide
CCQLYKGEYIKTWRPRYFLLKSDGSFIGYKERPEAPDQTLPPLNNFSVAECQLMKTERPRPNTFVIRCLQWTTVIERTFHVDSPDEREEWMRAIQMVANSLKQRAPGEDPMDYKCGSPSDSST

SEQ ID NO: 17157 - protein, 124 aa, Artificial Sequence
  Synthetic polypeptide
CCQLYKGEYIKTWRPRYFLLKSDGSFIGYKERPEAPDQTLPPLNNFSVAECQLMKTERPRPNTFVIRCLQWTTVIERTFHVDSPDEREEWMRAIQMVANSLKQRAPGEDPMDYKCGSPSDSSTT

SEQ ID NO: 17158 - protein, 125 aa, Artificial Sequence
  Synthetic polypeptide
CCQLYKGEYIKTWRPRYFLLKSDGSFIGYKERPEAPDQTLPPLNNFSVAECQLMKTERPRPNTFVIRCLQWTTVIERTFHVDSPDEREEWMRAIQMVANSLKQRAPGEDPMDYKCGSPSDSSTTE

SEQ ID NO: 17159 - protein, 142 aa, Artificial Sequence
  Synthetic polypeptide
CCQLYKGEYIKTWRPRYFLLKSDGSFIGYKERPEAPDQTLPPLNNFSVAECQLMKTERPRPNTFVIRCLQWTTVIERTFHVDSPDEREEWMRAIQMVANSLKQRAPGEDPMDYKCGSPSDSSTTEEMEVAVSKARAKVTMND

SEQ ID NO: 17160 - protein, 148 aa, Artificial Sequence
  Synthetic polypeptide
CCQLYKGEYIKTWRPRYFLLKSDGSFIGYKERPEAPDQTLPPLNNFSVAECQLMKTERPRPNTFVIRCLQWTTVIERTFHVDSPDEREEWMRAIQMVANSLKQRAPGEDPMDYKCGSPSDSSTTEEMEVAVSKARAKVTMNDFDYLKL

SEQ ID NO: 17161 - protein, 175 aa, Artificial Sequence
  Synthetic polypeptide
CCQLYKGEYIKTWRPRYFLLKSDGSFIGYKERPEAPDQTLPPLNNFSVAECQLMKTERPRPNTFVIRCLQWTTVIERTFHVDSPDEREEWMRAIQMVANSLKQRAPGEDPMDYKCGSPSDSSTTEEMEVAVSKARAKVTMNDFDYLKLLGKGTFGKVILVREKATGRYYAMKILR

SEQ ID NO: 17162 - protein, 472 aa, Artificial Sequence
  Synthetic polypeptide
CCQLYKGEYIKTWRPRYFLLKSDGSFIGYKERPEAPDQTLPPLNNFSVAECQLMKTERPRPNTFVIRCLQWTTVIERTFHVDSPDEREEWMRAIQMVANSLKQRAPGEDPMDYKCGSPSDSSTTEEMEVAVSKARAKVTMNDFDYLKLLGKGTFGKVILVREKATGRYYAMKILRKEVIIAKDEVAHTVTESRVLQNTRHPFLTALKYAFQTHDRLCFVMEYANGGELFFHLSRERVFTEERARFYGAEIVSALEYLHSRDVVYRDIKLENLMLDKDGHIKITDFGLCKEGISDGATMKTFCGTPEYLAPEVLEDNDYGRAVDWWGLGVVMYEMMCGRLPFYNQDHERLFELILMEEIRFPRTLSPEAKSLLAGLLKKDPKQRLGGGPSDAKEVMEHRFFLSINWQDVVQKKLLPPFKPQVTSEVDTRYFDDEFTAQSITITPPDRYDSLGLLELDQRTHFPQFSYSASIRE

SEQ ID NO: 17163 - protein, 429 aa, Artificial Sequence
  Synthetic polypeptide
CCQLYKGEYIKTWRPRYFLLKSDGSFIGYKERPEAPDQTLPPLNNFSVAECQLMKTERPRPNTFVIRCLQWTTVIERTFHVDSPDEREEWMRAIQMVANSLKQRAPGEDPMDYKCGSPSDSSTTEEMEVAVSKARAKVTMNDFDYLKLLGKGTFGKVILVREKATGRYYAMKILRKEVIIAKDEVAHTVTESRVLQNTRHPFLTALKYAFQTHDRLCFVMEYANGGELFFHLSRERVFTEERARFYGAEIVSALEYLHSRDVVYRDIKVLEDNDYGRAVDWWGLGVVMYEMMCGRLPFYNQDHERLFELILMEEIRFPRTLSPEAKSLLAGLLKKDPKQRLGGGPSDAKEVMEHRFFLSINWQDVVQKKLLPPFKPQVTSEVDTRYFDDEFTAQSITITPPDRYDSLGLLELDQRTHFPQFSYSASIRE

SEQ ID NO: 17164 - protein, 12 aa, Artificial Sequence
  Synthetic polypeptide
QARSLMLSALQG

SEQ ID NO: 17165 - protein, 28 aa, Artificial Sequence
  Synthetic polypeptide
SGLTSQISDVVSSTRVNTSRPGGHGTSC

SEQ ID NO: 17166 - protein, 6 aa, Artificial Sequence
  Synthetic polypeptide
GQGHAG

SEQ ID NO: 17167 - protein, 101 aa, Artificial Sequence; identical to SEQ ID NO: 3604
  Synthetic polypeptide

SEQ ID NO: 17168 - protein, 898 aa, Artificial Sequence; identical to SEQ ID NO: 1589
  Synthetic polypeptide

SEQ ID NO: 17169 - protein, 889 aa, Artificial Sequence; identical to SEQ ID NO: 1591
  Synthetic polypeptide

SEQ ID NO: 17170 - protein, 18 aa, Artificial Sequence
  Synthetic polypeptide
GGRITRAEQDILFLLRSP

SEQ ID NO: 17171 - protein, 721 aa, Artificial Sequence
  Synthetic polypeptide
GWAWWLTPVIPALWEAEAGGSRGLNKTSSFSCEAHNAKGVTTSRTATITVLPQQPRNLHLVSRQPTELEVAWTPGLSGIYPLTHCTLQAVLSNDGMGIQAGEPDPPEEPLTSQASVPPHQLRLGSLHPHTPYHIRVACTSSQGPSSWTHWLPVETPEGVPLGPPENISATRNGSQAFVHWQEPRAPLQGTLLGYRLAYQGQDTPEVLMDIGLRQEVTLELQGDGSVSNLTVCVAAYTAAGDGPWSLPVPLEAWRPGQAQPVHQLVKEPSTPAFSWPWWYVLLGAVVAAACVLILALFLVHRRKKETRYGEVFEPTVERGELVVRYRVRKSYSRRTTEATLNSLGISEELKEKLRDVMVDRHKVALGKTLGEGEFGAVMEGQLNQDDSILKVAVKTMKIAICTRSELEDFLSEAVCMKEFDHPNVMRLIGVCFQGSERESFPAPVVILPFMKHGDLHSFLLYSRLGDQPVYLPTQMLVKFMADIASGMEYLSTKRFIHRDLAARNCMLNENMSVCVADFGLSKKIYNGDYYRQGRIAKMPVKWIAIESLADRVYTSKSDVWSFGVTMWEIATRGQTPYPGVENSEIYDYLRQGNRLKQPADCLDGLYALMSRCWELNPQDRPSFTELREDLENTLKALPPAQEPDEILYVNMDEGGGYPEPPGAAGGADPPTQPDPKDSCSCLTAAEVHPAGRYVLCPSTTPSPAQPADRGSPAAPGQEDGA

SEQ ID NO: 17172 - protein, 712 aa, Artificial Sequence
  Synthetic polypeptide
GWAWWLTPVIPALWEAEAGGSRGLNKTSSFSCEAHNAKGVTTSRTATITVLPQQPRNLHLVSRQPTELEVAWTPGLSGIYPLTHCTLQAVLSNDGMGIQAGEPDPPEEPLTSQASVPPHQLRLGSLHPHTPYHIRVACTSSQGPSSWTHWLPVETPEGVPLGPPENISATRNGSQAFVHWQEPRAPLQGTLLGYRLAYQGQDTPEVLMDIGLRQEVTLELQGDGSVSNLTVCVAAYTAAGDGPWSLPVPLEAWRPVKEPSTPAFSWPWWYVLLGAVVAAACVLILALFLVHRRKKETRYGEVFEPTVERGELVVRYRVRKSYSRRTTEATLNSLGISEELKEKLRDVMVDRHKVALGKTLGEGEFGAVMEGQLNQDDSILKVAVKTMKIAICTRSELEDFLSEAVCMKEFDHPNVMRLIGVCFQGSERESFPAPVVILPFMKHGDLHSFLLYSRLGDQPVYLPTQMLVKFMADIASGMEYLSTKRFIHRDLAARNCMLNENMSVCVADFGLSKKIYNGDYYRQGRIAKMPVKWIAIESLADRVYTSKSDVWSFGVTMWEIATRGQTPYPGVENSEIYDYLRQGNRLKQPADCLDGLYALMSRCWELNPQDRPSFTELREDLENTLKALPPAQEPDEILYVNMDEGGGYPEPPGAAGGADPPTQPDPKDSCSCLTAAEVHPAGRYVLCPSTTPSPAQPADRGSPAAPGQEDGA

SEQ ID NO: 17173 - protein, 14 aa, Artificial Sequence
  Synthetic polypeptide
SQHFGRLRRADHEG

SEQ ID NO: 17174 - protein, 398 aa, Artificial Sequence; identical to SEQ ID NO: 2248
  Synthetic polypeptide

SEQ ID NO: 17175 - protein, 11 aa, Artificial Sequence
  Synthetic polypeptide
WTLCFEQPGHQ

SEQ ID NO: 17176 - protein, 13 aa, Artificial Sequence
  Synthetic polypeptide
GQKIETILANMAA

SEQ ID NO: 17177 - protein, 473 aa, Artificial Sequence
  Synthetic polypeptide
HGRLIFDNLKKSIAYTLTSNIPEITPFLLFIMANIPLPLGTITILCIDLGTDMVPAISLAYEAAESDIMKRQPRNPRTDKLVNERLISMAYGQIGMIQALGGFFSYFVILAENGFLPGNLVGIRLNWDDRTVNDLEDSYGQQWTYEQRKVVEFTCHTAFFVSIVVVQWADLIICKTRRNSVFQQGMKNKILIFGLFEETALAAFLSYCPGMDVALRMYPLKPSWWFCAFPYSFLIFVYDEIRKLILRRNPGGEGARQGSRGGRGAAGSQAAGPRLPSPCWMALPPGSHSSLSSHLSGHPLCLLTGLCLCGFLVSLPLCPSLCWAARLACLSPSLTLSLSFLLCLSRLGGEGNLLLTSAPPHRPSLPRPPGPGPPLSVPPILYSGGRSPLFLWPHLGPHPLHYLLPPPLWLASLPCPKPLSSLFSVSVSLPLLTPLSIPPAPATSLGSFLLPFSPPADAISGSGQLSNISVGRE

SEQ ID NO: 17178 - protein, 260 aa, Artificial Sequence
  Synthetic polypeptide
HGRLIFDNLKKSIAYTLTSNIPEITPFLLFIMANIPLPLGTITILCIDLGTDMVPAISLAYEAAESDIMKRQPRNPRTDKLVNERLISMAYGQIGMIQALGGFFSYFVILAENGFLPGNLVGIRLNWDDRTVNDLEDSYGQQWTYEQRKVVEFTCHTAFFVSIVVVQWADLIICKTRRNSVFQQGMKNKILIFGLFEETALAAFLSYCPGMDVALRMYPLKPSWWFCAFPYSFLIFVYDEIRKLILRRNPGGWVEKETYY

SEQ ID NO: 17179 - protein, 73 aa, Artificial Sequence
  Synthetic polypeptide
SQHFGRLKQADHEVRRSRPSWLTWPPDLRQPKEVHCLHPDQQYPGDHALPAVHHGQHPAAPGHHHHPLHRSGH

SEQ ID NO: 17180 - protein, 472 aa, Artificial Sequence
  Synthetic polypeptide
GRLIFDNLKKSIAYTLTSNIPEITPFLLFIMANIPLPLGTITILCIDLGTDMVPAISLAYEAAESDIMKRQPRNPRTDKLVNERLISMAYGQIGMIQALGGFFSYFVILAENGFLPGNLVGIRLNWDDRTVNDLEDSYGQQWTYEQRKVVEFTCHTAFFVSIVVVQWADLIICKTRRNSVFQQGMKNKILIFGLFEETALAAFLSYCPGMDVALRMYPLKPSWWFCAFPYSFLIFVYDEIRKLILRRNPGGEGARQGSRGGRGAAGSQAAGPRLPSPCWMALPPGSHSSLSSHLSGHPLCLLTGLCLCGFLVSLPLCPSLCWAARLACLSPSLTLSLSFLLCLSRLGGEGNLLLTSAPPHRPSLPRPPGPGPPLSVPPILYSGGRSPLFLWPHLGPHPLHYLLPPPLWLASLPCPKPLSSLFSVSVSLPLLTPLSIPPAPATSLGSFLLPFSPPADAISGSGQLSNISVGRE

SEQ ID NO: 17181 - protein, 259 aa, Artificial Sequence
  Synthetic polypeptide
GRLIFDNLKKSIAYTLTSNIPEITPFLLFIMANIPLPLGTITILCIDLGTDMVPAISLAYEAAESDIMKRQPRNPRTDKLVNERLISMAYGQIGMIQALGGFFSYFVILAENGFLPGNLVGIRLNWDDRTVNDLEDSYGQQWTYEQRKVVEFTCHTAFFVSIVVVQWADLIICKTRRNSVFQQGMKNKILIFGLFEETALAAFLSYCPGMDVALRMYPLKPSWWFCAFPYSFLIFVYDEIRKLILRRNPGGWVEKETYY

SEQ ID NO: 17182 - protein, 15 aa, Artificial Sequence
  Synthetic polypeptide
SQHFGRLKQADHEAA

SEQ ID NO: 17183 - protein, 55 aa, Artificial Sequence
  Synthetic polypeptide
SRQIMRPPDLRQPKEVHCLHPDQQYPGDHALPAVHHGQHPAAPGHHHHPLHRSGH

SEQ ID NO: 17184 - protein, 188 aa, Artificial Sequence; identical to SEQ ID NO: 2917
  Synthetic polypeptide

SEQ ID NO: 17185 - protein, 172 aa, Artificial Sequence; identical to SEQ ID NO: 3011
  Synthetic polypeptide

SEQ ID NO: 17186 - protein, 333 aa, Artificial Sequence; identical to SEQ ID NO: 2389
  Synthetic polypeptide

SEQ ID NO: 17187 - protein, 251 aa, Artificial Sequence
  Synthetic polypeptide
ASVPPTCKTRPSSNPALPELLGEFSSPFRDEITLAILQLQENNRLEILKRKWWEGGRCPKEEDHRAKGLGMENIGGIFIVLICGLIIAVFVAVMEFIWSTRRSAESEETPALHPAACQCSALGPRTPLKEPSMLLVKVPSTRVQVAFSRTSLRQVCPFLLQHQLSSLYWIQATNVQICCHFSSLKPSPDLTFPPSHRPLSSLLFTALAAVGGLPDASSFFFPPISSCPPLQSGIGPCHSTEATLVTSNFHV

SEQ ID NO: 17188 - protein, 250 aa, Artificial Sequence
  Synthetic polypeptide
ASVPPTCKTRPSSNPALPELLGEFSSPFRDEITLAILQLQENNRLEILKRKWWEGGRCPKEEDHRAKGLGMENIGGIFIVLICGLIIAVFVAVMEFIWSTRRSAESEEVSVCQEMLQELRHAVSCRKTSRSRRRRRPGGPSRALLSLRAVREMRLSNGKLYSAGAGGDAGSAHGGPQRLLDDPGPPSGARPAAPTPCTHVRVCQECRRIQALRASGAGAPPRGLGVPAEATSPPRPRPGPAGPRELAEHE

SEQ ID NO: 17189 - protein, 62 aa, Artificial Sequence
  Synthetic polypeptide
PPGCMVLGRRHHRPEPLYPQPAKPGLAAIQPSQSCWENSAPRSGMRSHWPSCSFRRTTGWRS

SEQ ID NO: 17190 - protein, 18 aa, Artificial Sequence
  Synthetic polypeptide
QQSSPPRAVGRIQLPVPG

SEQ ID NO: 17191 - protein, 53 aa, Artificial Sequence
  Synthetic polypeptide
NSNWEATKANKASSRHVMLGTQVAKLKRPWPGCHLFPKPLPRMHFLWLIRHEL

SEQ ID NO: 17192 - protein, 49 aa, Artificial Sequence
  Synthetic polypeptide
QLGSYKSEQGFQQTCDAGDTGCQAEEALAGLSPIPEAVTSNAFPVAHQT

SEQ ID NO: 17193 - protein, 57 aa, Artificial Sequence
  Synthetic polypeptide
RGLGRAVTYSRSRYLECISCGSSDMSCERGRHQSLQCRSPEEQCLDVVTHWIQEGEE

SEQ ID NO: 17194 - protein, 77 aa, Artificial Sequence
  Synthetic polypeptide
RGLGRAVTYSRSRYLECISCGSSDMSCERGRHQSLQCRSPEEQCLDVVTHWIQEGEEGRPKDDRHLRGCGYLPGCPG

SEQ ID NO: 17195 - protein, 151 aa, Artificial Sequence
  Synthetic polypeptide
RGLGRAVTYSRSRYLECISCGSSDMSCERGRHQSLQCRSPEEQCLDVVTHWIQEGEEGRPKDDRHLRGCGYLPGCPGSNGFHNNDTFHFLKCCNTTKCNEGPILELENLPQNGRQCYSCKGNSTHGCSSEETFLIDCRGPMNQCLVATGTH

SEQ ID NO: 17196 - protein, 235 aa, Artificial Sequence
  Synthetic polypeptide
RGLGRAVTYSRSRYLECISCGSSDMSCERGRHQSLQCRSPEEQCLDVVTHWIQEGEEGRPKDDRHLRGCGYLPGCPGSNGFHNNDTFHFLKCCNTTKCNEGPILELENLPQNGRQCYSCKGNSTHGCSSEETFLIDCRGPMNQCLVATGTHEPKNQSYMVRGCATASMCQHAHLGDAFSMNHIDVSCCTKSGCNHPDLDVQYRSGAAPQPGPAHLSLTITLLMTARLWGGTLLWT

SEQ ID NO: 17197 - protein, 181 aa, Artificial Sequence
  Synthetic polypeptide
RGLGRAVTYSRSRYLECISCGSSDMSCERGRHQSLQCRSPEEQCLDVVTHWIQEGEEGRPKDDRHLRGCGYLPGCPGSNGFHNNDTFHFLKCCNTTKCNEGPILELENLPQNGRQCYSCKGNSTHGCSSEETFLIDCRGPMNQCLVATGTHERSLWGSWLPCKSTTALRPPCCEEAQATHV

SEQ ID NO: 17198 - protein, 186 aa, Artificial Sequence
  Synthetic polypeptide
RGLGRAVTYSRSRYLECISCGSSDMSCERGRHQSLQCRSPEEQCLDVVTHWIQEGEEGRPKDDRHLRGCGYLPGCPGSNGFHNNDTFHFLKCCNTTKCNEGPKPKNQSYMVRGCATASMCQHAHLGDAFSMNHIDVSCCTKSGCNHPDLDVQYRSGAAPQPGPAHLSLTITLLMTARLWGGTLLWT

SEQ ID NO: 17199 - protein, 190 aa, Artificial Sequence
  Synthetic polypeptide
RGLGRAVTYSRSRYLECISCGSSDMSCERGRHQSLQCRSPEEQCLDVVTHWIQEGEEVLELENLPQNGRQCYSCKGNSTHGCSSEETFLIDCRGPMNQCLVATGTHEPKNQSYMVRGCATASMCQHAHLGDAFSMNHIDVSCCTKSGCNHPDLDVQYRSGAAPQPGPAHLSLTITLLMTARLWGGTLLWT

SEQ ID NO: 17200 - protein, 86 aa, Artificial Sequence
  Synthetic polypeptide
ELKSWNGWDHRKGSSQPANKSPSSHWQALHAQGRAVTYSRSRYLECISCGSSDMSCERGRHQSLQCRSPEEQCLDVVTHWIQEGEE

SEQ ID NO: 17201 - protein, 106 aa, Artificial Sequence
  Synthetic polypeptide
ELKSWNGWDHRKGSSQPANKSPSSHWQALHAQGRAVTYSRSRYLECISCGSSDMSCERGRHQSLQCRSPEEQCLDVVTHWIQEGEEGRPKDDRHLRGCGYLPGCPG

SEQ ID NO: 17202 - protein, 180 aa, Artificial Sequence
  Synthetic polypeptide
ELKSWNGWDHRKGSSQPANKSPSSHWQALHAQGRAVTYSRSRYLECISCGSSDMSCERGRHQSLQCRSPEEQCLDVVTHWIQEGEEGRPKDDRHLRGCGYLPGCPGSNGFHNNDTFHFLKCCNTTKCNEGPILELENLPQNGRQCYSCKGNSTHGCSSEETFLIDCRGPMNQCLVATGTH

SEQ ID NO: 17203 - protein, 264 aa, Artificial Sequence
  Synthetic polypeptide
ELKSWNGWDHRKGSSQPANKSPSSHWQALHAQGRAVTYSRSRYLECISCGSSDMSCERGRHQSLQCRSPEEQCLDVVTHWIQEGEEGRPKDDRHLRGCGYLPGCPGSNGFHNNDTFHFLKCCNTTKCNEGPILELENLPQNGRQCYSCKGNSTHGCSSEETFLIDCRGPMNQCLVATGTHEPKNQSYMVRGCATASMCQHAHLGDAFSMNHIDVSCCTKSGCNHPDLDVQYRSGAAPQPGPAHLSLTITLLMTARLWGGTLLWT

SEQ ID NO: 17204 - protein, 210 aa, Artificial Sequence
  Synthetic polypeptide
ELKSWNGWDHRKGSSQPANKSPSSHWQALHAQGRAVTYSRSRYLECISCGSSDMSCERGRHQSLQCRSPEEQCLDVVTHWIQEGEEGRPKDDRHLRGCGYLPGCPGSNGFHNNDTFHFLKCCNTTKCNEGPILELENLPQNGRQCYSCKGNSTHGCSSEETFLIDCRGPMNQCLVATGTHERSLWGSWLPCKSTTALRPPCCEEAQATHV

SEQ ID NO: 17205 - protein, 215 aa, Artificial Sequence
  Synthetic polypeptide
ELKSWNGWDHRKGSSQPANKSPSSHWQALHAQGRAVTYSRSRYLECISCGSSDMSCERGRHQSLQCRSPEEQCLDVVTHWIQEGEEGRPKDDRHLRGCGYLPGCPGSNGFHNNDTFHFLKCCNTTKCNEGPKPKNQSYMVRGCATASMCQHAHLGDAFSMNHIDVSCCTKSGCNHPDLDVQYRSGAAPQPGPAHLSLTITLLMTARLWGGTLLWT

SEQ ID NO: 17206 - protein, 219 aa, Artificial Sequence
  Synthetic polypeptide
ELKSWNGWDHRKGSSQPANKSPSSHWQALHAQGRAVTYSRSRYLECISCGSSDMSCERGRHQSLQCRSPEEQCLDVVTHWIQEGEEVLELENLPQNGRQCYSCKGNSTHGCSSEETFLIDCRGPMNQCLVATGTHEPKNQSYMVRGCATASMCQHAHLGDAFSMNHIDVSCCTKSGCNHPDLDVQYRSGAAPQPGPAHLSLTITLLMTARLWGGTLLWT

SEQ ID NO: 17207 - protein, 51 aa, Artificial Sequence
  Synthetic polypeptide
NPGMDGTTEKGVPNLQTNLPQVIGKLYMHRAGLSPIPEAVTSNAFPVAHQT

SEQ ID NO: 17208 - protein, 73 aa, Artificial Sequence
  Synthetic polypeptide
TEKTEVGVWGCQNVWKMRVKILEWMGPQKREFPTCKQISLKSLASSTCTGPGCHLFPKPLPRMHFLWLIRHEL

SEQ ID NO: 17209 - protein, 27 aa, Artificial Sequence
  Synthetic polypeptide
KSDNTRKEKSWSWWRKAVPTQRRPTGP

SEQ ID NO: 17210 - protein, 37 aa, Artificial Sequence
  Synthetic polypeptide
QYPEGEELELVEKSCTHSEKTNRTLSYRTGLKITSLT

SEQ ID NO: 17211 - protein, 105 aa, Artificial Sequence
  Synthetic polypeptide
QYPEGEELELVEKSCTHSEKTNRTLSYRTGLKITSLTEVVCGLDLCNQGNSGRAVTYSRSRYLECISCGSSDMSCERGRHQSLQCRSPEEQCLDVVTHWIQEGEE

SEQ ID NO: 17212 - protein, 125 aa, Artificial Sequence
  Synthetic polypeptide
QYPEGEELELVEKSCTHSEKTNRTLSYRTGLKITSLTEVVCGLDLCNQGNSGRAVTYSRSRYLECISCGSSDMSCERGRHQSLQCRSPEEQCLDVVTHWIQEGEEGRPKDDRHLRGCGYLPGCPG

SEQ ID NO: 17213 - protein, 199 aa, Artificial Sequence
  Synthetic polypeptide
QYPEGEELELVEKSCTHSEKTNRTLSYRTGLKITSLTEVVCGLDLCNQGNSGRAVTYSRSRYLECISCGSSDMSCERGRHQSLQCRSPEEQCLDVVTHWIQEGEEGRPKDDRHLRGCGYLPGCPGSNGFHNNDTFHFLKCCNTTKCNEGPILELENLPQNGRQCYSCKGNSTHGCSSEETFLIDCRGPMNQCLVATGTH

SEQ ID NO: 17214 - protein, 283 aa, Artificial Sequence
  Synthetic polypeptide
QYPEGEELELVEKSCTHSEKTNRTLSYRTGLKITSLTEVVCGLDLCNQGNSGRAVTYSRSRYLECISCGSSDMSCERGRHQSLQCRSPEEQCLDVVTHWIQEGEEGRPKDDRHLRGCGYLPGCPGSNGFHNNDTFHFLKCCNTTKCNEGPILELENLPQNGRQCYSCKGNSTHGCSSEETFLIDCRGPMNQCLVATGTHEPKNQSYMVRGCATASMCQHAHLGDAFSMNHIDVSCCTKSGCNHPDLDVQYRSGAAPQPGPAHLSLTITLLMTARLWGGTLLWT

SEQ ID NO: 17215 - protein, 229 aa, Artificial Sequence
  Synthetic polypeptide
QYPEGEELELVEKSCTHSEKTNRTLSYRTGLKITSLTEVVCGLDLCNQGNSGRAVTYSRSRYLECISCGSSDMSCERGRHQSLQCRSPEEQCLDVVTHWIQEGEEGRPKDDRHLRGCGYLPGCPGSNGFHNNDTFHFLKCCNTTKCNEGPILELENLPQNGRQCYSCKGNSTHGCSSEETFLIDCRGPMNQCLVATGTHERSLWGSWLPCKSTTALRPPCCEEAQATHV

SEQ ID NO: 17216 - protein, 234 aa, Artificial Sequence
  Synthetic polypeptide
QYPEGEELELVEKSCTHSEKTNRTLSYRTGLKITSLTEVVCGLDLCNQGNSGRAVTYSRSRYLECISCGSSDMSCERGRHQSLQCRSPEEQCLDVVTHWIQEGEEGRPKDDRHLRGCGYLPGCPGSNGFHNNDTFHFLKCCNTTKCNEGPKPKNQSYMVRGCATASMCQHAHLGDAFSMNHIDVSCCTKSGCNHPDLDVQYRSGAAPQPGPAHLSLTITLLMTARLWGGTLLWT

SEQ ID NO: 17217 - protein, 238 aa, Artificial Sequence
  Synthetic polypeptide
QYPEGEELELVEKSCTHSEKTNRTLSYRTGLKITSLTEVVCGLDLCNQGNSGRAVTYSRSRYLECISCGSSDMSCERGRHQSLQCRSPEEQCLDVVTHWIQEGEEVLELENLPQNGRQCYSCKGNSTHGCSSEETFLIDCRGPMNQCLVATGTHEPKNQSYMVRGCATASMCQHAHLGDAFSMNHIDVSCCTKSGCNHPDLDVQYRSGAAPQPGPAHLSLTITLLMTARLWGGTLLWT

SEQ ID NO: 17218 - protein, 68 aa, Artificial Sequence
  Synthetic polypeptide
SPVTGTCKLKTNKQGEPISHPPDWQAFKNLTIPGRRRAGAGGEKLYPLREDQQDPELSDWLEDHQPYR

SEQ ID NO: 17219 - protein, 105 aa, Artificial Sequence
  Synthetic polypeptide
SPVTGTCKLKTNKQGEPISHPPDWQAFKNLTIPGRRRAGAGGEKLYPLREDQQDPELSDWLEDHQPYRGCVWVRLVQPGQLWPGCHLFPKPLPRMHFLWLIRHEL

SEQ ID NO: 17220 - protein, 269 aa, Artificial Sequence
  Synthetic polypeptide
DQPGQHSKNSSLQKNLKISRAWWCMPMVLATLEAKAGGSLEPRRCRLQQAMITPLHSRPAKPKNQAEAQKVTFSQDPTTVALCISKEGRPPARISWLSSLDWEAKETQVSGTLAGTVTVTSRFTLVPSGRADGVTVTCKVEHESFEEPALIPVTLSVRYPPEVSISGYDDNWYLGRTDATLSCDVRSNPEPTGYDWSTTSGTFPTSAVAQGSQLVIHAVDSLFNTTFVCTVTNAVGMGRAEQVIFVRALEDDMESQLDGSLISRRAVYV

SEQ ID NO: 17221 - protein, 438 aa, Artificial Sequence
  Synthetic polypeptide
DQPGQHSKNSSLQKNLKISRAWWCMPMVLATLEAKAGGSLEPRRCRLQQAMITPLHSRPAKPKNQAEAQKVTFSQDPTTVALCISKEGRPPARISWLSSLDWEAKETQVSGTLAGTVTVTSRFTLVPSGRADGVTVTCKVEHESFEEPALIPVTLSVRYPPEVSISGYDDNWYLGRTDATLSCDVRSNPEPTGYDWSTTSGTFPTSAVAQGSQLVIHAVDSLFNTTFVCTVTNAVGMGRAEQVIFVRETPNTAGAGATGGIIGGIIAAIIATAVAATGILICRQQRKEQTLQGAEEDEDLEGPPSYKPPTPKAKLEAQEMPSQLFTLGASEHSPLKTPYFDAGASCTEQEMPRYHELPTLEERSGPLHPGATSLGSPIPVPPGPPAVEDVSLDLEDEEGEEEEEYLDKINPIYDALSYSSPSDSYQGKGFVMSRAMYV

SEQ ID NO: 17222 - protein, 379 aa, Artificial Sequence
  Synthetic polypeptide
DQPGQHSKNSSLQKNLKISRAWWCMPMVLATLEAKAGGSLEPRRCRLQQAMITPLHSRPAKPKNQAEAQKVTFSQDPTTVALCISKEGRPPARISWLSSLDWEAKETQVSGTLAGTVTVTSRFTLVPSGRADGVTVTCKVEHESFEEPALIPVTLSVRYPPEVSISGYDDNWYLGRTDATLSCDVRSNPEPTGYDWSTTSGTFPTSAVAQGSQLVIHAVDSLFNTTFVCTVTNAVGMGRAEQVIFVRETPRASPRDVGPLVWGAVGGTLLVLLLLAGGSLAFILLRVRRRRKSPGGAGGGASGDGGFYDPKAQVLGNGDPVFWTPVVPGPMEPDGKDEEEEEEEEKAEKGLMLPPPPALEDDMESQLDGSLISRRAVYV

SEQ ID NO: 17223 - protein, 23 aa, Artificial Sequence
  Synthetic polypeptide
EVQAAASYDHTTALETSQAQEPS

SEQ ID NO: 17224 - protein, 98 aa, Artificial Sequence
  Synthetic polypeptide
SHHCTRDQPSPRTKLRPRRSRSARTLRQWPSASPKRAAHLPGSPGSHPWTGKPKRLRCQGPWPELSLSPAASPWCPRAEQMVSRSPAKWSMRASRNQP

SEQ ID NO: 17225 - protein, 25 aa, Artificial Sequence
  Synthetic polypeptide
EAKTGRSLEDSCGPASPRTARGWCR

SEQ ID NO: 17226 - protein, 98 aa, Artificial Sequence
  Synthetic polypeptide
GLLRASLSEDRAGLVSVNLLVTSSVAAFVVGAVVSGFSVGVCVRASEGCCGRVCQVGHACRVCVHERRSWWPQRPGRWLSRRWGFQKARGSPRCRLGV

SEQ ID NO: 17227 - protein, 309 aa, Artificial Sequence
  Synthetic polypeptide
GLLRASLSEDRAGLVSVNLLVTSSVAAFVVGAVVSGFSVGWFVGLRERRELARRKDKEAILAHGAGEAVLSVSRLGERRAQGPGGRGGGGGGGAGVPPEALLAPLMQNGWAKATLLQGGPHDLDSGLLPTPEQTPLPQKRLPTPHPHPHALGPRAWDHGHPLLPASASSSLLLLAPARAPEQPPAPGEPTPDGRLYAARPGRASHGDFPLTPHASPDRRRVVSAPTGPLDPASAADGLPRPWSPPPTGSLRRPLGPHAPPAATLRRTHTFNSGEARPGDRHRGCHARPGTDLAHLLPYGGADRTAPPVP

SEQ ID NO: 17228 - protein, 59 aa, Artificial Sequence; identical to SEQ ID NO: 4740
  Synthetic polypeptide

SEQ ID NO: 17229 - protein, 112 aa, Artificial Sequence; identical to SEQ ID NO: 3457
  Synthetic polypeptide

SEQ ID NO: 17230 - protein, 55 aa, Artificial Sequence
  Synthetic polypeptide
AVWPGAAALPCWDLVYSSEVGPLHPQHFPPGRSRTAPPRRRWSSRKGSSPARRST

SEQ ID NO: 17231 - protein, 283 aa, Artificial Sequence
  Synthetic polypeptide
CVAWGCRFTLLGLGLLVGGGPPPPPALPTWSVPNGPSPEEVEQQKRQQPGPSEHIERRVSNAGGPPAPPAGGPPPPPGPPPPPGPPPPPGLPPSGVPAAAHGAGGGPPPAPPLPAAQGPGGGGAGAPGLAAAIAGAKLRKVSKQEEASGGPTAPKAESGRSGGGGLMEEMNAMLARRRKATQVGEKTPKDESANQEEPEARVPAQSESVRRPWEKNSTTLPRMKSSSSVTTSETQPCTPSSSDYSDLQRVKQELLEEVKKELQKVKEEIIEAFVQELRKRGSP

SEQ ID NO: 17232 - protein, 156 aa, Artificial Sequence
  Synthetic polypeptide
MCGLGLPLYPAGTWFTRRRWAPSTPSTSHLVGPERPLPGGGGAAEKAAARPVGAHRAPGLQCRRPTCSPRWGSTPTTRTSPSSRSPPTPRFAPFGGPSCSARSRGRTTPCTPSPGSTGPWWWGSWGPRPGRSYCWSQTQESQQAGGGLRGAHSPQS

SEQ ID NO: 17233 - protein, 266 aa, Artificial Sequence
  Synthetic polypeptide
GGGPPPPPALPTWSVPNGPSPEEVEQQKRQQPGPSEHIERRVSNAGGPPAPPAGGPPPPPGPPPPPGPPPPPGLPPSGVPAAAHGAGGGPPPAPPLPAAQGPGGGGAGAPGLAAAIAGAKLRKVSKQEEASGGPTAPKAESGRSGGGGLMEEMNAMLARRRKATQVGEKTPKDESANQEEPEARVPAQSESVRRPWEKNSTTLPRMKSSSSVTTSETQPCTPSSSDYSDLQRVKQELLEEVKKELQKVKEEIIEAFVQELRKRGSP

SEQ ID NO: 17234 - protein, 60 aa, Artificial Sequence
  Synthetic polypeptide
GPAPWLMPVISALWEAEAHGLPEEVGPLHPQHFPPGRSRTAPPRRRWSSRKGSSPARRST

SEQ ID NO: 17235 - protein, 152 aa, Artificial Sequence
  Synthetic polypeptide
SQHFGRPRHTDYLRRWAPSTPSTSHLVGPERPLPGGGGAAEKAAARPVGAHRAPGLQCRRPTCSPRWGSTPTTRTSPSSRSPPTPRFAPFGGPSCSARSRGRTTPCTPSPGSTGPWWWGSWGPRPGRSYCWSQTQESQQAGGGLRGAHSPQS

SEQ ID NO: 17236 - protein, 258 aa, Artificial Sequence
  Synthetic polypeptide
AQEFETSLGNVETLSDIREGAPLGVHLPFVGYSYSCMALRDSEVPGPTPMELEAEQLLEPHVQAPSLEPSVSPQDETAEVAVPAAVPAAEAEAEVTLRELQEALEEEVLTRQSLSREMEAIRTDNQNFASQLREAEARNRDLEAHVRQLQERMELLQAEGATAVTGVPSPRATDPPSHLDGPPAVAVGQCPLVGPGPMHRRHLLLPARVPRPGLSEALSLLLFAVVLSRAAALGCIGLVAHAGQLTAVWRRPGAARAP

SEQ ID NO: 17237 - protein, 259 aa, Artificial Sequence
  Synthetic polypeptide
AQEFETSLGNVETLSDIREGAPLGVHLPFVGYSYSCMALRDSEVPGPTPMELEAEQLLEPHVQAPSLEPSVSPQDETAEVAVPAAVPAAEAEAEVTLRELQEALEEEVLTRQSLSREMEAIRTDNQNFASQLREAEARNRDLEAHVRQLQERMELLQAEGATAVTGVPSPRATDPPSHMAPRPWLWASARWWGQAPCTAATCCSLPGSLGLAYRRRFPCSCSPLFCLVPPPWAALGWWPTPANSPQSGAAQEPPALPEP

SEQ ID NO: 17238 - protein, 164 aa, Artificial Sequence
  Synthetic polypeptide
AQEFETSLGNVETLSDIREGAPLGVHLPFVGYSYSCMALRDSEVPGPTPMELEAEQLLEPHVQAPSLEPSVSPQDETAEVAVPAAVPAAEAEAEVTLRELQEALEEEVLTRQSLSREMEAIRTDNQNFASQLREAEARNRDLEAHVRQLQERMELLQAEGATGP

SEQ ID NO: 17239 - protein, 153 aa, Artificial Sequence
  Synthetic polypeptide
AQEFETSLGNVETLSDIREGAPLGVHLPFVGYSYSCMALRDSEVPGPTPMELEAEQLLEPHVQAPSLEPSVSPQDETSTTRGRGSEPGPRGTRPAVAGADGVAAGRGSHRSLGLAYRRRFPCSCSPLFCLVPPPWAALGWWPTPANSPQSGAA

SEQ ID NO: 17240 - protein, 45 aa, Artificial Sequence
  Synthetic polypeptide
GQARWLTPVTPAIWQAEVGGLLEPRSSRPAWAMWRHCRTFGKVRR

SEQ ID NO: 17241 - protein, 55 aa, Artificial Sequence
  Synthetic polypeptide
PQQFGRPKWVDCLSPGVRDQPGQCGDTVGHSGRCAARGPPAFCGLLLLLHGPQGQ

SEQ ID NO: 17242 - protein, 13 aa, Artificial Sequence
  Synthetic polypeptide
EPGADRPGSEEWA

SEQ ID NO: 17243 - protein, 85 aa, Artificial Sequence
  Synthetic polypeptide
SLELIDLDPRNGHELPGAAPAGGKLSQGSRDTGHEMSAQPHRQSPTLPRAGEAGPGSLPQATARRPLPHPGAQWAGEERGDPGPA

SEQ ID NO: 17244 - protein, 446 aa, Artificial Sequence
  Synthetic polypeptide
TWIRGMGMNSPELLLLVENCPKGAETLVTRCLHSLTDKVPPSPELVKRVRDLYHKRLPDVRFLIPVLNGLEKKEVIQALPKLIKLNPIVVKEVFNRLLGTQHGEGNSALSPLNPGELLIALHNIDSVKCDMKSIIKATNLCFAERNVYTSEVLAVVMQQLMEQSPLPMLLMRTVIQSLTMYPRLGGFVMNILSRLIMKQVWKYPKVWEGFIKCCQRTKPQSFQVILQLPPQQLGAVFDKCPELREPLLAHVRSFTPHQQAHIPNSIMTILEASGKQEPEAKEAPAGPLEEDDLEPLTLAPAPAPRPPQDLIGLRLAQEKALKRQLEEEQKLKPGGVGAPSSSSPSPSPSARPGPPPSEEAMDFREEGPECETPGIFISMDDDSGLTEAALLDSSLEGPLPKETAAGGLTLKEERSPQTLAPVGEDAMKTPSPAAEDAREPEAKGNS

SEQ ID NO: 17245 - protein, 162 aa, Artificial Sequence
  Synthetic polypeptide
ASGLGPHQHGVPTRGHASLLPGHLHPRGVSRHGSPDQAPGSAHGHTDDSCRTGTRCRADQTVQGGAQGGEGGEDRERPDQAAPVSPGPSHLGGGFPELHVPPGGRGTAGQEEARAHYPCHSAPAGRRWWAQENFPSQRRAEAPYRCPGGSHEAGRCEADPAG

SEQ ID NO: 17246 - protein, 865 aa, Artificial Sequence
  Synthetic polypeptide
EPQAWVLISMVYLPEAMPASFQAIYTPVESAGTEAQIKHLARLMATQMTAAGLGPGVEQTKQCKEEPKEEKVVKTESVLIKRRLSAQGQAISVVGSLSSMSPLEEEAPQAKRRPEPIIPVTQPRLAGAGGRKKIFRLSDVLKPLTDAQVEAMKLGAVKRILRAEKAVACSGAAQVRIKILASLVTQFNSGLKAEVLSFILEDVRARLDLAFAWLYQEYNAYLAAGASGSLDKYEDCLIRLLSGLQEKPDQKDGIFTKVVLEAPLITESALEVVRKYCEDESRTYLGMSTLRDLIFKRPSRQFQYLHVLLDLSSHEKDKVRSQALLFIKRMYEKEQLREYVEKFALNYLQLLVHPNPPSVLFGADKDTEVAAPWTEETVKQCLYLYLALLPQNHKLIHELAAVYTEAIADIKRTVLRVIEQPIRGMGMNSPELLLLVENCPKGAETLVTRCLHSLTDKVPPSPELVKRVRDLYHKRLPDVRFLIPVLNGLEKKEVIQALPKLIKLNPIVVKEVFNRLLGTQHGEGNSALSPLNPGELLIALHNIDSVKCDMKSIIKATNLCFAERNVYTSEVLAVVMQQLMEQSPLPMLLMRTVIQSLTMYPRLGGFVMNILSRLIMKQVWKYPKVWEGFIKCCQRTKPQSFQVILQLPPQQLGAVFDKCPELREPLLAHVRSFTPHQQAHIPNSIMTILEASGKQEPEAKEAPAGPLEEDDLEPLTLAPAPAPRPPQDLIGLRLAQEKALKRQLEEEQKLKPGGVGAPSSSSPSPSPSARPGPPPSEEAMDFREEGPECETPGIFISMDDDSGLTEAALLDSSLEGPLPKETAAGGLTLKEERSPQTLAPVGEDAMKTPSPAAEDAREPEAKGNS

SEQ ID NO: 17247 - protein, 264 aa, Artificial Sequence
  Synthetic polypeptide
EPQAWVLISMVYLPEAMPASFQAIYTPVESAGTEAQIKHLARLMATQMTAAGLGPGVEQTKQCKEEPKEEKVVKTESVLIKRRLSAQGQAISVVGSLSSMSPLEEEAPQAKRRPEPIIPVTQPRLAGAGGRKKIFRLSDVLKPLTDAQVEAMKLGAVKRILRAEKAVACSGAAQVRIKILASLVTQFNSGLKAEVLSFILEDVRARLDLAFAWLYQEYNAYLAAGSSPRLCWRRHSSQRVPWRWSASTARMRVAPIWACPHFET

SEQ ID NO: 17248 - protein, 47 aa, Artificial Sequence
  Synthetic polypeptide
SLRPGSSSAWCTYPRPCQPPSRPSTPPWSQQARKPRSSTWLGSWPHR

SEQ ID NO: 17249 - protein, 16 aa, Artificial Sequence
  Synthetic polypeptide
KGRAMGRGQGSLGAAA

SEQ ID NO: 17250 - protein, 36 aa, Artificial Sequence
  Synthetic polypeptide
NDGYQRLKRTCYGKRARQPWSSCLSSWCTLPSPPST

SEQ ID NO: 17251 - protein, 1056 aa, Artificial Sequence
  Synthetic polypeptide
WLPEAEKDVLWEEGKAALEQLLKFMVHPAISSINLTTALGSLANIARQRPMFMSEVIQAYETLHANLPPTLAKSQVSSVRKNLKLHLLSVLKHPASLEFQAQITTLLVDLGTPQAEIARNMPSSKDTRKRPRDDSDSTLKKMKLEPNLGEDDEDKDLEPGPSGTSKASAQISGQSDTDITAEFLQPLLTPDNVANLVLISMVYLPEAMPASFQAIYTPVESAGTEAQIKHLARLMATQMTAAGLGPGVEQTKQCKEEPKEEKVVKTESVLIKRRLSAQGQAISVVGSLSSMSPLEEEAPQAKRRPEPIIPVTQPRLAGAGGRKKIFRLSDVLKPLTDAQVEAMKLGAVKRILRAEKAVACSGAAQVRIKILASLVTQFNSGLKAEVLSFILEDVRARLDLAFAWLYQEYNAYLAAGASGSLDKYEDCLIRLLSGLQEKPDQKDGIFTKVVLEAPLITESALEVVRKYCEDESRTYLGMSTLRDLIFKRPSRQFQYLHVLLDLSSHEKDKVRSQALLFIKRMYEKEQLREYVEKFALNYLQLLVHPNPPSVLFGADKDTEVAAPWTEETVKQCLYLYLALLPQNHKLIHELAAVYTEAIADIKRTVLRVIEQPIRGMGMNSPELLLLVENCPKGAETLVTRCLHSLTDKVPPSPELVKRVRDLYHKRLPDVRFLIPVLNGLEKKEVIQALPKLIKLNPIVVKEVFNRLLGTQHGEGNSALSPLNPGELLIALHNIDSVKCDMKSIIKATNLCFAERNVYTSEVLAVVMQQLMEQSPLPMLLMRTVIQSLTMYPRLGGFVMNILSRLIMKQVWKYPKVWEGFIKCCQRTKPQSFQVILQLPPQQLGAVFDKCPELREPLLAHVRSFTPHQQAHIPNSIMTILEASGKQEPEAKEAPAGPLEEDDLEPLTLAPAPAPRPPQDLIGLRLAQEKALKRQLEEEQKLKPGGVGAPSSSSPSPSPSARPGPPPSEEAMDFREEGPECETPGIFISMDDDSGLTEAALLDSSLEGPLPKETAAGGLTLKEERSPQTLAPVGEDAMKTPSPAAEDAREPEAKGNS

SEQ ID NO: 17252 - protein, 455 aa, Artificial Sequence
  Synthetic polypeptide
WLPEAEKDVLWEEGKAALEQLLKFMVHPAISSINLTTALGSLANIARQRPMFMSEVIQAYETLHANLPPTLAKSQVSSVRKNLKLHLLSVLKHPASLEFQAQITTLLVDLGTPQAEIARNMPSSKDTRKRPRDDSDSTLKKMKLEPNLGEDDEDKDLEPGPSGTSKASAQISGQSDTDITAEFLQPLLTPDNVANLVLISMVYLPEAMPASFQAIYTPVESAGTEAQIKHLARLMATQMTAAGLGPGVEQTKQCKEEPKEEKVVKTESVLIKRRLSAQGQAISVVGSLSSMSPLEEEAPQAKRRPEPIIPVTQPRLAGAGGRKKIFRLSDVLKPLTDAQVEAMKLGAVKRILRAEKAVACSGAAQVRIKILASLVTQFNSGLKAEVLSFILEDVRARLDLAFAWLYQEYNAYLAAGSSPRLCWRRHSSQRVPWRWSASTARMRVAPIWACPHFET

SEQ ID NO: 17253 - protein, 392 aa, Artificial Sequence
  Synthetic polypeptide
ASYPASPHLPFHIREMRRTRGSASRVAVVKVKPHDKDAKMKYQECNKIVKQKAFERAIAGDEHKRSVVDSLDIESMTIEDEYSGPKLEDGKVTISFMKELMQWYKDQKKLHRKCAYQILVQVKEVLSKLSTLVETTLKETEKITVCGDTHGQFYDLLNIFELNGLPSETNPYIFNGDFVDRGSFSVEVILTLFGFKLLYPDHFHLLRGNHETDNMNQIYGFEGEVKAKYTAQMYELFSEVFEWLPLAQCINGKVLIMHGGLFSEDGVTLDDIRKIERNRQPPDSGPMCDLLWSDPQPQNGRSISKRGVSCQFGPDVTKAFLEENNLDYIIRSHEVKAEGYEVAHGGRCVTVFSAPNYCDQMGNKASYIHLQGSDLRPQFHQFTAVGRPSSGS

SEQ ID NO: 17254 - protein, 405 aa, Artificial Sequence
  Synthetic polypeptide
ASYPASPHLPFHIREMRRTRGSASRVAVVKVKPHDKDAKMKYQECNKIVKQKAFERAIAGDEHKRSVVDSLDIESMTIEDEYSGPKLEDGKVTISFMKELMQWYKDQKKLHRKCAYQILVQVKEVLSKLSTLVETTLKETEKITVCGDTHGQFYDLLNIFELNGLPSETNPYIFNGDFVDRGSFSVEVILTLFGFKLLYPDHFHLLRGNHETDNMNQIYGFEGEVKAKYTAQMYELFSEVFEWLPLAQCINGKVLIMHGGLFSEDGVTLDDIRKIERNRQPPDSGPMCDLLWSDPQPQNGRSISKRGVSCQFGPDVTKAFLEENNLDYIIRSHEVKAEGYEVAHGGRCVTVFSAPNYCDQMGNKASYIHLQGSDLRPQFHQFTAVPHPNVKPMAYANTLLQLGMM

SEQ ID NO: 17255 - protein, 383 aa, Artificial Sequence
  Synthetic polypeptide
ASYPASPHLPFHIREMRRTRGSASRVAVVKVKPHDKDAKMKYQECNKIVKQKAFERAIAGDEHKRSVVDSLDIESMTIEDEYSGPKLEDGKVTISFMKELMQWYKDQKKLHRKCAYQTEKITVCGDTHGQFYDLLNIFELNGLPSETNPYIFNGDFVDRGSFSVEVILTLFGFKLLYPDHFHLLRGNHETDNMNQIYGFEGEVKAKYTAQMYELFSEVFEWLPLAQCINGKVLIMHGGLFSEDGVTLDDIRKIERNRQPPDSGPMCDLLWSDPQPQNGRSISKRGVSCQFGPDVTKAFLEENNLDYIIRSHEVKAEGYEVAHGGRCVTVFSAPNYCDQMGNKASYIHLQGSDLRPQFHQFTAVPHPNVKPMAYANTLLQLGMM

SEQ ID NO: 17256 - protein, 19 aa, Artificial Sequence
  Synthetic polypeptide
NEENKRISLKGSGGQGEAP

SEQ ID NO: 17257 - protein, 4 aa, Artificial Sequence
  Synthetic polypeptide
RWSR

SEQ ID NO: 17258 - protein, 75 aa, Artificial Sequence
  Synthetic polypeptide
NSVSTKNTKISRVWWRMPVIPATLEAEAGELLEPGRRTCASATFEDFQIRPHALTVHSYRAPAFCDHCGEMLFGL

SEQ ID NO: 17259 - protein, 791 aa, Artificial Sequence
  Synthetic polypeptide
NSVSTKNTKISRVWWRMPVIPATLEAEAGELLEPGRRTCASATFEDFQIRPHALTVHSYRAPAFCDHCGEMLFGLVRQGLKCDGCGLNYHKRCAFSIPNNCSGARKRRLSSTSLASGHSVRLGTSESLPCTAEELSRSTTELLPRRPPSSSSSSSASSYTGRPIELDKMLLSKVKVPHTFLIHSYTRPTVCQACKKLLKGLFRQGLQCKDCKFNCHKRCATRVPNDCLGEALINGDVPMEEATDFSEADKSALMDESEDSGVIPGSHSENALHASEEEEGEGGKAQSSLGYIPLMRVVQSVRHTTRKSSTTLREGWVVHYSNKDTLRKRHYWRLDCKCITLFQNNTTNRYYKEIPLSEILTVESAQNFSLVPPGTNPHCFEIVTANATYFVGEMPGGTPGGPSGQGAEAARGWETAIRQALMPVILQDAPSAPGHAPHRQASLSISVSNSQIQENVDIATVYQIFPDEVLGSGQFGVVYGGKHRKTGRDVAVKVIDKLRFPTKQESQLRNEVAILQSLRHPGIVNLECMFETPEKVFVVMEKLHGDMLEMILSSEKGRLPERLTKFLITQILVALRHLHFKNIVHCDLKPENVLLASADPFPQVKLCDFGFARIIGEKSFRRSVVGTPAYLAPEVLLNQGYNRSLDMWSVGVIMYVSLSGTFPFNEDEDINDQIQNAAFMYPASPWSHISAGAIDLINNLLQVKMRKRYSVDKSLSHPWLQEYQTWLDLRELEGKMGERYITHESDDVRWEQFAAEHPLPGSGLPTDRDLGGACPPQDHDMQGLAERISVL

SEQ ID NO: 17260 - protein, 801 aa, Artificial Sequence
  Synthetic polypeptide
NSVSTKNTKISRVWWRMPVIPATLEAEAGELLEPGRRTCASATFEDFQIRPHALTVHSYRAPAFCDHCGEMLFGLVRQGLKCDGCGLNYHKRCAFSIPNNCSGARKRRLSSTSLASGHSVRLGTSESLPCTAEELSRSTTELLPRRPPSSSSSSSASSYTGRPIELDKMLLSKVKVPHTFLIHSYTRPTVCQACKKLLKGLFRQGLQCKDCKFNCHKRCATRVPNDCLGEALINGDVPMEEATDFSEADKSALMDESEDSGVIPGSHSENALHASEEEEGEGGKAQSSLGYIPLMRVVQSVRHTTRKSSTTLREGWVVHYSNKDTLRKRHYWRLDCKCITLFQNNTTNRYYKEIPLSEILTVESAQNFSLVPPGTNPHCFEIVTANATYFVGEMPGGTPGGPSGQGAEAARGWETAIRQALMPVILQDAPSAPGHAPHRQASLSISVSNSQIQENVDIATVYQIFPDEVLGSGQFGVVYGGKHRKTGRDVAVKVIDKLRFPTKQESQLRNEVAILQSLRHPGIVNLECMFETPEKVFVVMEKLHGDMLEMILSSEKGRLPERLTKFLITQILVALRHLHFKNIVHCDLKPENVLLASADPFPQVKLCDFGFARIIGEKSFRRSVVGTPAYLAPEVLLNQGYNRSLDMWSVGVIMYVSLSGTFPFNEDEDINDQIQNAAFMYPASPWSHISAGGAWGPPTPWAAIDLINNLLQVKMRKRYSVDKSLSHPWLQEYQTWLDLRELEGKMGERYITHESDDVRWEQFAAEHPLPGSGLPTDRDLGGACPPQDHDMQGLAERISVL

SEQ ID NO: 17261 - protein, 55 aa, Artificial Sequence
  Synthetic polypeptide
SQLLWRLRQENCLNPGGGLVPRPPSRTSRSARTPSRCTPIGRLPSVITAGRCSSA

SEQ ID NO: 17262 - protein, 32 aa, Artificial Sequence
  Synthetic polypeptide
TREADLCLGHLRGLPDPPARPHGALLSGACLL

SEQ ID NO: 17263 - protein, 42 aa, Artificial Sequence
  Synthetic polypeptide
FVSSTGQNACLPHEISSLPTWCQQPFAHTLPPMKRGISPEPG

SEQ ID NO: 17264 - protein, 245 aa, Artificial Sequence
  Synthetic polypeptide
NGLICVKHRPKCLPATRNIFPSNLVSAAFRSYSTTYEERNITGTRVKVPVGQEVEGMNILGLVVFAIVFGVALRKLGPEGELLIRFFNSFNEATMVLVSWIMWYAPVGIMFLVAGKIVEMEDVGLLFARLGKYILCCLLGHAIHGLLVLPLIYFLFTRKNPYRFLWGIVTPLATAFGTSSSSATLPLMMKCVEENNGVAKHISRFILPIGATVNMDGAALFQCVAAVFIAQLSQQSLDFVKIITI

SEQ ID NO: 17265 - protein, 369 aa, Artificial Sequence
  Synthetic polypeptide
NGLICVKHRPKCLPATRNIFPSNLVSAAFRSYSTTYEERNITGTRVKVPVGQEVEGMNILGLVVFAIVFGVALRKLGPEGELLIRFFNSFNEATMVLVSWIMWYAPVGIMFLVAGKIVEMEDVGLLFARLGKYILCCLLGHAIHGLLVLPLIYFLFTRKNPYRFLWGIVTPLATAFGTSSSSATLPLMMKCVEENNGVAKHISRFILPIGATVNMDGAALFQCVAAVFIAQLSQQSLDFVKIITILVTATASSVGAAGIPAGGVLTLAIILEAVNLPVDHISLILAVDWLVDRSCTVLNVEGDALGAGLLQNYVDRTESRSTEPELIQVKSELPLDPLPVPTEEGNPLLKHYRGPAGDATVASEKESVM

SEQ ID NO: 17266 - protein, 50 aa, Artificial Sequence
  Synthetic polypeptide
NGVIVIIPKAVVRMKWVNLCQAQAKMPACHTKYLPFQPGVSSLSLILYHL

SEQ ID NO: 17267 - protein, 25 aa, Artificial Sequence
  Synthetic polypeptide
LLMDPLYPHPEPGRQDAPGQVVHAV

SEQ ID NO: 17268 - protein, 74 aa, Artificial Sequence
  Synthetic polypeptide
RKPDTKATECMIPLIYNVQNRHIHRDRKETRGCQALGERRVTANGSALSSSRTGQARRAWPSGTCSLMMMRNRS

SEQ ID NO: 17269 - protein, 142 aa, Artificial Sequence
  Synthetic polypeptide
WIRFILIQNRAGKTRLAKWYMQFDDDEKQKLIEEVHAVVTVRDAKHTNFVEFRNFKIIYRRYAGLYFCICVDVNDNNLAYLEAIHNFVEVLNEYFHNVCELDLVFNFYKVYTVVDEMFLAGEIRETSQTKVLKQLLMLQSLE

SEQ ID NO: 17270 - protein, 156 aa, Artificial Sequence
  Synthetic polypeptide
WIRFILIQNRAGKTRLAKWYMQFDDDEKQKLIEEVHAVVTVRDAKHTNFVEVLAISVADSLSVLQFRNFKIIYRRYAGLYFCICVDVNDNNLAYLEAIHNFVEVLNEYFHNVCELDLVFNFYKVYTVVDEMFLAGEIRETSQTKVLKQLLMLQSLE

SEQ ID NO: 17271 - protein, 104 aa, Artificial Sequence
  Synthetic polypeptide
WIRFILIQNRAGKTRLAKWYMQFDDDEKQKLIEEVHAVVTVRDAKHTNFVEVLNEYFHNVCELDLVFNFYKVYTVVDEMFLAGEIRETSQTKVLKQLLMLQSLE

SEQ ID NO: 17272 - protein, 152 aa, Artificial Sequence
  Synthetic polypeptide
GQEFETSLANVIRFILIQNRAGKTRLAKWYMQFDDDEKQKLIEEVHAVVTVRDAKHTNFVEFRNFKIIYRRYAGLYFCICVDVNDNNLAYLEAIHNFVEVLNEYFHNVCELDLVFNFYKVYTVVDEMFLAGEIRETSQTKVLKQLLMLQSLE

SEQ ID NO: 17273 - protein, 166 aa, Artificial Sequence
  Synthetic polypeptide
GQEFETSLANVIRFILIQNRAGKTRLAKWYMQFDDDEKQKLIEEVHAVVTVRDAKHTNFVEVLAISVADSLSVLQFRNFKIIYRRYAGLYFCICVDVNDNNLAYLEAIHNFVEVLNEYFHNVCELDLVFNFYKVYTVVDEMFLAGEIRETSQTKVLKQLLMLQSLE

SEQ ID NO: 17274 - protein, 114 aa, Artificial Sequence
  Synthetic polypeptide
GQEFETSLANVIRFILIQNRAGKTRLAKWYMQFDDDEKQKLIEEVHAVVTVRDAKHTNFVEVLNEYFHNVCELDLVFNFYKVYTVVDEMFLAGEIRETSQTKVLKQLLMLQSLE

SEQ ID NO: 17275 - protein, 46 aa, Artificial Sequence
  Synthetic polypeptide
SQHFGRLRQADHIRSGVRDQPGQRDPLYPHPEPGRQDAPGQVVHAV

SEQ ID NO: 17276 - protein, 21 aa, Artificial Sequence
  Synthetic polypeptide
DSACKRLMAGLGPECRHCVND

SEQ ID NO: 17277 - protein, 15 aa, Artificial Sequence
  Synthetic polypeptide
MTEHGRHLPGQREQV

SEQ ID NO: 17278 - protein, 17 aa, Artificial Sequence
  Synthetic polypeptide
ELRTEHGRHLPGQREQV

SEQ ID NO: 17279 - protein, 226 aa, Artificial Sequence
  Synthetic polypeptide
NSGLSTEGIYRVSGNKSEMESLQRQFDQDHNLDLAEKDFTVNTVAGAMKSFFSELPDPLVPYNMQIDLVEAHKINDREQKLHALKEVLKKFPKENHEVFKYVISHLNKVSHNNKVNLMTSENLSICFWPTLMRPDFSTMDALTATRTYQTIIELFIQQCPFFFYNRPITEPPGARPSSPSAVASTVPFLTSTPVTSQPSPPQSPPPTPQSPMQPLLPSQLQAEHTL

SEQ ID NO: 17280 - protein, 3 aa, Artificial Sequence
  Synthetic polypeptide
TQD

SEQ ID NO: 17281 - protein, 15 aa, Artificial Sequence
  Synthetic polypeptide
EPCSIAGGLLQLYHP

SEQ ID NO: 17282 - protein, 82 aa, Artificial Sequence
  Synthetic polypeptide
PPALGCRPVPVHGLLGTMQHRRRTPSIIPPLIMGTMMTRIPWTSTPLWIKLLTRCVFQTSWPWSSLQSSSWWECWAMPWWSG

SEQ ID NO: 17283 - protein, 371 aa, Artificial Sequence
  Synthetic polypeptide
PSPGLQTCTSPWPARNHAASQEDSFNYTTPDYGHYDDKDTLDLNTPVDKTSNTLRVPDILALVIFAVVFLVGVLGNALVVWVTAFEAKRTINAIWFLNLAVADFLSCLALPILFTSIVQHHHWPFGGAACSILPSLILLNMYASILLLATISADRFLLVFKPIWCQNFRGAGLAWIACAVAWGLALLLTIPSFLYRVVREEYFPPKVLCGVDYSHDKRRERAVAIVRLVLGFLWPLLTLTICYTFILLRTWSRRATRSTKTLKVVVAVVASFFIFWLPYQVTGIMMSFLEPSSPTFLLLKKLDSLCVSFAYINCCINPIIYVVAGQGFQGRLRKSLPSLLRNVLTEESVVRESKSFTRSTVDTMAQKTQAV

SEQ ID NO: 17284 - protein, 360 aa, Artificial Sequence; identical to SEQ ID NO: 2327
  Synthetic polypeptide

SEQ ID NO: 17285 - protein, 85 aa, Artificial Sequence; identical to SEQ ID NO: 3841
  Synthetic polypeptide

SEQ ID NO: 17286 - protein, 10 aa, Artificial Sequence
  Synthetic polypeptide
VAGLLQLYHP

SEQ ID NO: 17287 - protein, 24 aa, Artificial Sequence
  Synthetic polypeptide
DSQLRLPGRAALVRGARGPHHPAL

SEQ ID NO: 17288 - protein, 408 aa, Artificial Sequence
  Synthetic polypeptide
MGWVLHKSKNLVCVFSAVSQAPRTGLGTHETLSYDFPAVLRWFAERVDLIILLFDAHKLEISDEFSEAIGALRGHEDKIRVVLNKADMVETQQLMRVYGALMWALGKVVGTPEVLRVYIGSFWSQPLLVPDNRRLFELEEQDLFRDIQGLPRHAALRKLNDLVKRARLVRVHAYIISYLKKEMPSVFGKENKKKQLILKLPVIFAKIQLEHHISPGDFPDCQKMQELLMAHDFTKFHSLKPKLLEALDEMLTHDIAKLMPLLRQEELESTEVGVQGGAFEGTHMGPFVERGPDEAMEDGEEGSDDEAEWVVTKDKSKYDEIFYNLAPADGKLSGSKAKTWMVGTKLPNSVLGRIWKLSDVDRDGMLDDEEFALASHLIEAKLEGHGLPANLPRRLVPPSKRRHKGSAE

SEQ ID NO: 17289 - protein, 93 aa, Artificial Sequence
  Synthetic polypeptide
WDGCFIRARILSVCSLRYPRLPGQGLAHMRLSATTSRPCCAGSRSAWTSSSCSLMRTSWRSRTSSQRPSARCGAMRTRSAWCSTRPTWWRRSS

SEQ ID NO: 17290 - protein, 245 aa, Artificial Sequence
  Synthetic polypeptide
AQEFEAAVHAYIISYLKKEMPSVFGKENKKKQLILKLPVIFAKIQLEHHISPGDFPDCQKMQELLMAHDFTKFHSLKPKLLEALDEMLTHDIAKLMPLLRQEELESTEVGVQGGAFEGTHMGPFVERGPDEAMEDGEEGSDDEAEWVVTKDKSKYDEIFYNLAPADGKLSGSKAKTWMVGTKLPNSVLGRIWKLSDVDRDGMLDDEEFALASHLIEAKLEGHGLPANLPRRLVPPSKRRHKGSAE

SEQ ID NO: 17291 - protein, 24 aa, Artificial Sequence
  Synthetic polypeptide
EAEAGGSLEPRNLRLQFTLTSSAT

SEQ ID NO: 17292 - protein, 51 aa, Artificial Sequence
  Synthetic polypeptide
GCSSRLHHQLPEEGDALCVWEGEQEEAADPQTARHLCEDSAGTSHLPWGLS

SEQ ID NO: 17293 - protein, 216 aa, Artificial Sequence
  Synthetic polypeptide
GQAWWLTPVIPALWEAEAGGSRGQQIKTILANTELLMAHDFTKFHSLKPKLLEALDEMLTHDIAKLMPLLRQEELESTEVGVQGGAFEGTHMGPFVERGPDEAMEDGEEGSDDEAEWVVTKDKSKYDEIFYNLAPADGKLSGSKAKTWMVGTKLPNSVLGRIWKLSDVDRDGMLDDEEFALASHLIEAKLEGHGLPANLPRRLVPPSKRRHKGSAE

SEQ ID NO: 17294 - protein, 55 aa, Artificial Sequence
  Synthetic polypeptide
HGAADGARLHQVSLAEAEAARGTGRDADARHRQAHAPAAAGGAGEHRGGRAGGRF

SEQ ID NO: 17295 - protein, 26 aa, Artificial Sequence
  Synthetic polypeptide
SQHFGRPRRADHEVSRSRPSWLTRSC

SEQ ID NO: 17296 - protein, 134 aa, Artificial Sequence
  Synthetic polypeptide
EYRLPWKECCSDQLRNLTLKGLWRRAVANAKSIGHLIFARLLRLQESSQGEHPPPEDEGGEPEHTWLTEMLENWTRTSLEKQEQPHEDPERKGSLSNLMDFVKKTGICASKWEWGTTHNFLYKHGGIRDKIMSS

SEQ ID NO: 17297 - protein, 284 aa, Artificial Sequence
  Synthetic polypeptide
EYRLPWKECCSDQLRNLTLKGLWRRAVANAKSIGHLIFARLLRLQESSQGEHPPPEDEGGEPEHTWLTEMLENWTRTSLEKQEQPHEDPERKGSLSNLMDFVKKTGICASKWEWGTTHNFLYKHGGIRDKIMSSRKHLHLVDAGLAINTPFPLVLPPTREVHLILSFDFSAGDPFETIRATTDYCRRHKIPFPQVEEAELDLWSKAPASCYILKGETGPVVMHFPLFNIDACGGDIEAWSDTYDTFKLADTYTLDVVVLLLALAKKNVRENKKKILRELMNVAG

SEQ ID NO: 17298 - protein, 298 aa, Artificial Sequence
  Synthetic polypeptide
EYRLPWKECCSDQLRNLTLKGLWRRAVANAKSIGHLIFARLLRLQESSQGEHPPPEDEGGEPEHTWLTEMLENWTRTSLEKQEQPHEDPERKGSLSNLMDFVKKTGICASKWEWGTTHNFLYKHGGIRDKIMSSRKHLHLVDAGLAINTPFPLVLPPTREVHLILSFDFSAGDPFETIRATTDYCRRHKIPFPQVEEAELDLWSKAPASCYILKGETGPVVMHFPLFNIDACGGDIEAWSDTYDTFKLADTYTLDVVVLLLALAKKNVRENKKKILRELMNVAGLYYPKDSARSCCLA

SEQ ID NO: 17299 - protein, 17 aa, Artificial Sequence
  Synthetic polypeptide
RVDESTDSLGRNVALTS

SEQ ID NO: 17300 - protein, 55 aa, Artificial Sequence
  Synthetic polypeptide
AGRSGSCLESHHFGRPRRVDHLRRRAPPSCSWALPPSNSFRSSLRCWRSMTGRPL

SEQ ID NO: 17301 - protein, 21 aa, Artificial Sequence
  Synthetic polypeptide
GEGLHLPAAGLFHRATASGHL

SEQ ID NO: 17302 - protein, 1204 aa, Artificial Sequence
  Synthetic polypeptide
GWAQWLMPGIPPLWEAKAGGSLEEKGSTFLQLGSSTEQQLQVIFEVLEEYDWTSFVAVTTRAPGHRAFLSYIEVLTDGSLVGWEHRGALTLDPGAGEAVLSAQLRSVSAQIRLLFCAREEAEPVFRAAEEAGLTGSGYVWFMVGPQLAGGGGSGAPGEPPLLPGGAPLPAGLFAVRSAGWRDDLARRVAAGVAVVARGAQALLRDYGFLPELGHDCRAQNRTHRGESLHRYFMNITWDNRDYSFNEDGFLVNPSLVVISLTRDRTWEVVGSWEQQTLRLKYPLWSRYGRFLQPVDDTQHLTVATLEERPFVIVEPADPISGTCIRDSVPCRSQLNRTHSPPPDAPRPEKRCCKGFCIDILKRLAHTIGFSYDLYLVTNGKHGKKIDGVWNGMIGEVFYQRADMAIGSLTINEERSEIVDFSVPFVETGISVMVARSNGTVSPSAFLEPYSPAVWVMMFVMCLTVVAVTVFIFEYLSPVGYNRSLATGKRPGGSTFTIGKSIWLLWALVFNNSVPVENPRGTTSKIMVLVWAFFAVIFLASYTANLAAFMIQEEYVDTVSGLSDRKFQRPQEQYPPLKFGTVPNGSTEKNIRSNYPDMHSYMVRYNQPRVEEALTQLKAGKLDAFIYDAAVLNYMARKDEGCKLVTIGSGKVFATTGYGIALHKGSRWKRPIDLALLQFLGDDEIEMLERLWLSGICHNDKIEVMSSKLDIDNMAGVFYMLLVAMGLSLLVFAWEHLVYWRLRHCLGPTHRMDFLLAFSRGMYSCCSAEAAPPPAKPPPPPQPLPSPAYPAPRPAPGPAPFVPRERASVDRWRRTKGAGPPGGAGLADGFHRYYGPIEPQGLGLGLGEARAAPRGAAGRPLSPPAAQPPQKPPPSYFAIVRDKEPAEPPAGAFPGFPSPPAPPAAAATAVGPPLCRLAFEDESPPAPARWPRSDPESQPLLGPGAGGAGGTGGAGGGAPAAPPPCRAAPPPCPYLDLEPSPSDSEDSESLGGASLGGLEPWWFADFPYPYAERLGPPPGRYWSVDKLGGWRAGSWDYLPPRSGPAAWHCRHCASLELLPPPRHLSCSHDGLDGGWWAPPPPPWAAGPLPRRRARCGCPRSHPHRPRASHRTPAAAAPHHHRHRRAAGGWDLPPPAPTSRSLEDLSSCPRAAPARRLTGPSRHARRCPHAAHWGPPLPTASHRRHRGGDLGTRRGSAHFSSLESEV

SEQ ID NO: 17303 - protein, 21 aa, Artificial Sequence
  Synthetic polypeptide
HRDWHIKEARPGADRELGPRA

SEQ ID NO: 17304 - protein, 10 aa, Artificial Sequence
  Synthetic polypeptide
LAHKGGQTRS

SEQ ID NO: 17305 - protein, 687 aa, Artificial Sequence
  Synthetic polypeptide
RRPDQELTGSWGHGPRSTLVRAKAMAPPPPPLAASTPLLHGEFGSYPARGPRFALTLTSQALHIQRLRPKPEARPRGGLVPLAEVSGCCTLRSRSPSDSAAYFCIYTYPRGRRGARRRATRTFRADGAATYEENRAEAQRWATALTCLLRGLPLPGDGEITPDLLPRPPRLLLLVNPFGGRGLAWQWCKNHVLPMISEAGLSFNLIQTERQNHARELVQGLSLSEWDGIVTVSGDGLLHEVLNGLLDRPDWEEAVKMPVGILPCGSGNALAGAVNQHGGFEPALGLDLLLNCSLLLCRGGGHPLDLLSVTLASGSRCFSFLSVAWGFVSDVDIQSERFRALGSARFTLGTVLGLATLHTYRGRLSYLPATVEPASPTPAHSLPRAKSELTLTPDPAPPMAHSPLHRSVSDLPLPLPQPALASPGSPEPLPILSLNGGGPELAGDWGGAGDAPLSPDPLLSSPPGSPKAALHSPVSEGAPVIPPSSGLPLPTPDARVGASTCGPPDHLLPPLGTPLPPDWVTLEGDFVLMLAISPSHLGADLVAAPHARFDDGLVHLCWVRSGISRAALLRLFLAMERGSHFSLGCPQLGYAAARAFRLEPLTPRGVLTVDGEQVEYGPLQAQMHPGIARGRTQTPALPAAPALYGRQPGAAHGLQPVCQGAALFFHNSWLWGSQDLFRIVLTEAVGG

SEQ ID NO: 17306 - protein, 642 aa, Artificial Sequence
  Synthetic polypeptide
RRPDQELTGSWGHGPRSTLVRAKAMAPPPPPLAASTPLLHGEFGSYPARGPRFALTLTSQALHIQRLRPKPEARPRGGLVPLAEVSGCCTLRSRSPSDSAAYFCIYTYPRGRRGARRRATRTFRADGAATYEENRAEAQRWATALTCLLRGLPLPGDGEITPDLLPRPPRLLLLVNPFGGRGLAWQWCKNHVLPMISEAGLSFNLIQTERQNHARELVQGLSLSEWDGIVTVSGDGLLHEVLNGLLDRPDWEEAVKMPVGILPCGSGNALAGAVNQHGGFEPALGLDLLLNCSLLLCRGGGHPLDLLSVTLASGSRCFSFLSVAWGFVSDVDIQSERFRALGSARFTLGTVLGLATLHTYRGRLSYLPATVEPASPTPAHSLPRAKSELTLTPDPAPPMAHSPLHRSVSDLPLPLPQPALASPGSPEPLPILSLNGGGPELAGDWGGAGDAPLSPDPLLSSPPGSPKAALHSPVSEGAPVIPPSSGLPLPTPDARVGASTCGPPDHLLPPLGTPLPPDWVTLEGDFVLMLAISPSHLGADLVAAPHARFDDGLVHLCWVRSGISRAALLRLFLAMERGSHFSLGCPQLGYAAARAFRLEPLTPRGVLTVDGEQVEYGPLQAQMHPGIGTLLTGPPGCPGREP

SEQ ID NO: 17307 - protein, 154 aa, Artificial Sequence
  Synthetic polypeptide
AEIMPLHSSLGNRVRLHLKKKKKATVAAFTASEGHAHPRVVELPKTDEGLGFNIMGGKEQNSPIYISRVIPGGVADRHGGLKRGDQLLSVNGVSVEGEQHEKAVELLKAAQGSVKLVVRYTPRVLEEMEARFEKMRSARRRQQHQSYSSLESRG

SEQ ID NO: 17308 - protein, 25 aa, Artificial Sequence
  Synthetic polypeptide
DFISKKKKKPQWLPSQPARATHIPG

SEQ ID NO: 17309 - protein, 55 aa, Artificial Sequence
  Synthetic polypeptide
TQEAEVAVSRDHAIALQPGQQSETSSQKKKKSHSGCLHSQRGPRTSQGSGATQDG

SEQ ID NO: 17310 - protein, 84 aa, Artificial Sequence
  Synthetic polypeptide
AEIMPLHSSLGNRVRLHLKKKKKSVEGEQHEKAVELLKAAQGSVKLVVRYTPRVLEEMEARFEKMRSARRRQQHQSYSSLESRG

SEQ ID NO: 17311 - protein, 22 aa, Artificial Sequence
  Synthetic polypeptide
DFISKKKKKALRVSSMRRRWSC

SEQ ID NO: 17312 - protein, 33 aa, Artificial Sequence
  Synthetic polypeptide
TQEAEVAVSRDHAIALQPGQQSETSSQKKKKKR

SEQ ID NO: 17313 - protein, 51 aa, Artificial Sequence
  Synthetic polypeptide
GQLLVQSEEWIRRDQHLKATSPSCTTLPRCPRLPRGLLPSGCPAGWARSST

SEQ ID NO: 17314 - protein, 258 aa, Artificial Sequence
  Synthetic polypeptide
GVDQKGPAPESHLSLLYHLTAVSSPAPGTPAFWVSGWLGPQQYLSYNSLRGEAEPCGAWVWENQVSWYWEKETTDLRIKEKLFLEAFKALGGKEPPSMRLKARPSSPGFSVLTCSAFSFYPPELQLRFLRNGLAAGTGQGDFGPNSDGSFHASSSLTVKSGDEHHYCCIVQHAGLAQPLRVELESPAKSSVLVVGIVIGVLLLTAAAVGGALLWRRMRSGLPAPWISLRGDDTGVLLPTPGEAQDADLKDVNVIPATA

SEQ ID NO: 17315 - protein, 126 aa, Artificial Sequence
  Synthetic polypeptide
GVDQKGPAPESHLSLLYHLTAVSSPAPGTPAFWVSGWLGPQQYLSYNSLRGEAEPCGAWVWENQVSWYWEKETTDLRIKEKLFLEAFKALGGKGPYTLQGLLGCELGPDNTSVPTAKFALNGEEFM

SEQ ID NO: 17316 - protein, 152 aa, Artificial Sequence
  Synthetic polypeptide
GVDQKGPAPESHLSLLYHLTAVSSPAPGTPAFWVSGWLGPQQYLSYNSLRGEAEPCGAWVWENQVSWYWEKETTDLRIKEKLFLEAFKALGGKGPYTLQGLLGCELGPDNTSVPTAKFALNGEEFMNFDLKQGTWGGDWPEALAISQRWQQQ

SEQ ID NO: 17317 - protein, 210 aa, Artificial Sequence
  Synthetic polypeptide
GVDQKGPAPESHLSLLYHLTAVSSPAPGTPAFWVSGWLGPQQYLSYNSLRGEAEPCGAWVWENQVSWYWEKETTDLRIKEKLFLEAFKALGGKGPYTLQGLLGCELGPDNTSVPTAKFALNGEEFMNFDLKQGTWGGDWPEALAISQRWQQQDKAANKELTFLLFSCPHRLREHLERGRGNLEWKDTVSHYVAQAGLELLGSSDSPALVS

SEQ ID NO: 17318 - protein, 197 aa, Artificial Sequence
  Synthetic polypeptide
GVDQKGPAPESHLSLLYHLTAVSSPAPGTPAFWVSGWLGPQQYLSYNSLRGEAEPCGAWVWENQVSWYWEKETTDLRIKEKLFLEAFKALGGKGPYTLQGLLGCELGPDNTSVPTAKFALNGEEFMNFDLKQGTWGGDWPEALAISQRWQQQDKAANKELTFLLFSCPHRLREHLERGRGNLEWKEPKARQIFCAWI

SEQ ID NO: 17319 - protein, 350 aa, Artificial Sequence
  Synthetic polypeptide
GVDQKGPAPESHLSLLYHLTAVSSPAPGTPAFWVSGWLGPQQYLSYNSLRGEAEPCGAWVWENQVSWYWEKETTDLRIKEKLFLEAFKALGGKGPYTLQGLLGCELGPDNTSVPTAKFALNGEEFMNFDLKQGTWGGDWPEALAISQRWQQQDKAANKELTFLLFSCPHRLREHLERGRGNLEWKEPPSMRLKARPSSPGFSVLTCSAFSFYPPELQLRFLRNGLAAGTGQGDFGPNSDGSFHASSSLTVKSGDEHHYCCIVQHAGLAQPLRVELESPAKSSVLVVGIVIGVLLLTAAAVGGALLWRRMRSGLPAPWISLRGDDTGVLLPTPGEAQDADLKDVNVIPATA

SEQ ID NO: 17320 - protein, 23 aa, Artificial Sequence
  Synthetic polypeptide
GQLLVQSEEWIRRDQHLSPPPCA

SEQ ID NO: 17321 - protein, 174 aa, Artificial Sequence
  Synthetic polypeptide
GVDQKGPAPEPPSMRLKARPSSPGFSVLTCSAFSFYPPELQLRFLRNGLAAGTGQGDFGPNSDGSFHASSSLTVKSGDEHHYCCIVQHAGLAQPLRVELESPAKSSVLVVGIVIGVLLLTAAAVGGALLWRRMRSGLPAPWISLRGDDTGVLLPTPGEAQDADLKDVNVIPATA

SEQ ID NO: 17322 - protein, 42 aa, Artificial Sequence
  Synthetic polypeptide
KSSGTRIEKATSPSCTTLPRCPRLPRGLLPSGCPAGWARSST

SEQ ID NO: 17323 - protein, 293 aa, Artificial Sequence
  Synthetic polypeptide
NVQNRQIYQDRKQMNGCQGSGSSGCLTGTDLLFGVIKKLWNSDRESHLSLLYHLTAVSSPAPGTPAFWVSGWLGPQQYLSYNSLRGEAEPCGAWVWENQVSWYWEKETTDLRIKEKLFLEAFKALGGKEPPSMRLKARPSSPGFSVLTCSAFSFYPPELQLRFLRNGLAAGTGQGDFGPNSDGSFHASSSLTVKSGDEHHYCCIVQHAGLAQPLRVELESPAKSSVLVVGIVIGVLLLTAAAVGGALLWRRMRSGLPAPWISLRGDDTGVLLPTPGEAQDADLKDVNVIPATA

SEQ ID NO: 17324 - protein, 161 aa, Artificial Sequence
  Synthetic polypeptide
NVQNRQIYQDRKQMNGCQGSGSSGCLTGTDLLFGVIKKLWNSDRESHLSLLYHLTAVSSPAPGTPAFWVSGWLGPQQYLSYNSLRGEAEPCGAWVWENQVSWYWEKETTDLRIKEKLFLEAFKALGGKGPYTLQGLLGCELGPDNTSVPTAKFALNGEEFM

SEQ ID NO: 17325 - protein, 187 aa, Artificial Sequence
  Synthetic polypeptide
NVQNRQIYQDRKQMNGCQGSGSSGCLTGTDLLFGVIKKLWNSDRESHLSLLYHLTAVSSPAPGTPAFWVSGWLGPQQYLSYNSLRGEAEPCGAWVWENQVSWYWEKETTDLRIKEKLFLEAFKALGGKGPYTLQGLLGCELGPDNTSVPTAKFALNGEEFMNFDLKQGTWGGDWPEALAISQRWQQQ

SEQ ID NO: 17326 - protein, 245 aa, Artificial Sequence
  Synthetic polypeptide
NVQNRQIYQDRKQMNGCQGSGSSGCLTGTDLLFGVIKKLWNSDRESHLSLLYHLTAVSSPAPGTPAFWVSGWLGPQQYLSYNSLRGEAEPCGAWVWENQVSWYWEKETTDLRIKEKLFLEAFKALGGKGPYTLQGLLGCELGPDNTSVPTAKFALNGEEFMNFDLKQGTWGGDWPEALAISQRWQQQDKAANKELTFLLFSCPHRLREHLERGRGNLEWKDTVSHYVAQAGLELLGSSDSPALVS

SEQ ID NO: 17327 - protein, 232 aa, Artificial Sequence
  Synthetic polypeptide
NVQNRQIYQDRKQMNGCQGSGSSGCLTGTDLLFGVIKKLWNSDRESHLSLLYHLTAVSSPAPGTPAFWVSGWLGPQQYLSYNSLRGEAEPCGAWVWENQVSWYWEKETTDLRIKEKLFLEAFKALGGKGPYTLQGLLGCELGPDNTSVPTAKFALNGEEFMNFDLKQGTWGGDWPEALAISQRWQQQDKAANKELTFLLFSCPHRLREHLERGRGNLEWKEPKARQIFCAWI

SEQ ID NO: 17328 - protein, 385 aa, Artificial Sequence
  Synthetic polypeptide
NVQNRQIYQDRKQMNGCQGSGSSGCLTGTDLLFGVIKKLWNSDRESHLSLLYHLTAVSSPAPGTPAFWVSGWLGPQQYLSYNSLRGEAEPCGAWVWENQVSWYWEKETTDLRIKEKLFLEAFKALGGKGPYTLQGLLGCELGPDNTSVPTAKFALNGEEFMNFDLKQGTWGGDWPEALAISQRWQQQDKAANKELTFLLFSCPHRLREHLERGRGNLEWKEPPSMRLKARPSSPGFSVLTCSAFSFYPPELQLRFLRNGLAAGTGQGDFGPNSDGSFHASSSLTVKSGDEHHYCCIVQHAGLAQPLRVELESPAKSSVLVVGIVIGVLLLTAAAVGGALLWRRMRSGLPAPWISLRGDDTGVLLPTPGEAQDADLKDVNVIPATA

SEQ ID NO: 17329 - protein, 38 aa, Artificial Sequence
  Synthetic polypeptide
RKPPLPPVPPYRGVLACPGDSCLLGVRLAGPAAVPELQ

SEQ ID NO: 17330 - protein, 833 aa, Artificial Sequence
  Synthetic polypeptide
FSAHHPQRLSSPNRDSMDSVKQSAALCLLRLYKASPDLVPMGEWTARVVHLLNDQHMGVVTAAVSLITCLCKKNPDDFKTCVSLAVSRLSRIVSSASTDLQDYTYYFVPAPWLSVKLLRLLQCYPPPEDAAVKGRLVECLETVLNKAQEPPKSKKVQHSNAKNAILFETISLIIHYDSEPNLLVRACNQLGQFLQHRETNLRYLALESMCTLASSEFSHEAVKTHIDTVINALKTERDVSVRQRAADLLYAMCDRSNAKQIVSEMLRYLETADYAIREEIVLKVAILAEKYAVDYSWYVDTILNLIRIAGDYVSEEVWYRVLQIVTNRDDVQGYAAKTVFEALQAPACHENMVKVGGYILGEFGNLIAGDPRSSPPVQFSLLHSKFHLCSVATRALLLSTYIKFINLFPETKATIQGVLRAGSQLRNADVELQQRAVEYLTLSSVASTDVLATVLEEMPPFPERESSILAKLKRKKGPGAGSALDDGRRDPSSNDINGGMEPTPSTVSTPSPSADLLGLRAAPPPAAPPASAGAGNLLVDVFDGPAAQPSLGPTPEEAFLSELEPPAPESPMALLADPAPAADPGPEDIGPPIPEADELLNKFVCKNNGVLFENQLLQIGVKSEFRQNLGRMYLFYGNKTSVQFQNFSPTVVHPGDLQTQLAVQTKRVAAQVDGGAQVQQVLNIECLRDFLTPPLLSVRFRYGGAPQALTLKLPVTINKFFQPTEMAAQDFFQRWKQLSLPQQEAQKIFKANHPMDAEVTKAKLLGFGSALLDNVDPNPENFVGAGIIQTKALQVGCLLRLEPNAQAQMYRLTLRTSKEPVSRHLCELLAQQF

SEQ ID NO: 17331 - protein, 811 aa, Artificial Sequence
  Synthetic polypeptide
FSAHHPQRLSSPNRDSMDSVKQSAALCLLRLYKASPDLVPMGEWTARVVHLLNDQHMGVVTAAVSLITCLCKKNPDDFKTCVSLAVSRLSRIVSSASTDLQDYTYYFVPAPWLSVKLLRLLQCYPPPEDAAVKGRLVECLETVLNKAQEPPKSKKVQHSNAKNAILFETISLIIHYDSEPNLLVRACNQLGQFLQHRETNLRYLALESMCTLASSEFSHEAVKTHIDTVINALKTERDVSVRQRAADLLYAMCDRSNAKQIVSEMLRYLETADYAIREEIVLKVAILAEKYAVDYSWYVDTILNLIRIAGDYVSEEVWYRVLQIVTNRDDVQGYAAKTVFEALQAPACHENMVKVGGYILGEFGNLIAGDPRSSPPVQFSLLHSKFHLCSVATRALLLSTYIKFINLFPETKATIQGVLRAGSQLRNADVELQQRAVEYLTLSSVASTDVLATVLEEMPPFPERESSILAKLKRKKGPGAGSALDDGRRDPSSNDINGGMEPTPSTVSTPSPSADLLGLRAAPPPAAPPASAGAGNLLVDVFDGPAAQPSLGPTPEEAFLSPGPEDIGPPIPEADELLNKFVCKNNGVLFENQLLQIGVKSEFRQNLGRMYLFYGNKTSVQFQNFSPTVVHPGDLQTQLAVQTKRVAAQVDGGAQVQQVLNIECLRDFLTPPLLSVRFRYGGAPQALTLKLPVTINKFFQPTEMAAQDFFQRWKQLSLPQQEAQKIFKANHPMDAEVTKAKLLGFGSALLDNVDPNPENFVGAGIIQTKALQVGCLLRLEPNAQAQMYRLTLRTSKEPVSRHLCELLAQQF

SEQ ID NO: 17332 - protein, 91 aa, Artificial Sequence
  Synthetic polypeptide
HADSLLTTHSGFHLPIGTAWTVSSRVRPCASFDCTRPRLTWCPWASGRRVWYTCSMTSTWVWSRPPSASSPVSARRTQMTSRRASLWLCRA

SEQ ID NO: 17333 - protein, 39 aa, Artificial Sequence
  Synthetic polypeptide
ITLILCSPPTAAFISQSGQHGQCQAECGPVPPSTVQGLA

SEQ ID NO: 17334 - protein, 78 aa, Artificial Sequence
  Synthetic polypeptide
AGHSVSHLQSQHLWRPRRADHEKHQKKSKLHGPTETSSCSGAAPTVEMDEELHYASLNFHGMNPSKDTSTEYSEVRTQ

SEQ ID NO: 17335 - protein, 34 aa, Artificial Sequence
  Synthetic polypeptide
GRAQCFTPAIPAPLEAKAGGSRETPEEVQVTWPH

SEQ ID NO: 17336 - protein, 61 aa, Artificial Sequence
  Synthetic polypeptide
PGTVFHTCNPSTFGGQGGRITRNTRRSPSYMAPLKPQAVQVPPLLWRWMRSCIMLPSTFMG

SEQ ID NO: 17337 - protein, 89 aa, Artificial Sequence
  Synthetic polypeptide
GRAQCFTPAIPAPLEAKAGGSRGQEIETILANMKHQKKSKLHGPTETSSCSGAAPTVEMDEELHYASLNFHGMNPSKDTSTEYSEVRTQ

SEQ ID NO: 17338 - protein, 13 aa, Artificial Sequence
  Synthetic polypeptide
HETPEEVQVTWPH

SEQ ID NO: 17339 - protein, 1138 aa, Artificial Sequence
  Synthetic polypeptide
AQEFEAAVSRDLTIALQAGQQMLGRPTLSVQQTPEGSLLARWEPPAGTAEDQVLGYRLQFGREDSTPLATLEFPPSEDRYTASGVHKGATYVFRLAARSRGGLGEEAAEVLSIPEDTPRGHPQILEAAGNASAGTVLLRWLPPVPAERNGAIVKYTVAVREAGALGPARETELPAAAEPGAENALTLQGLKPDTAYDLQVRAHTRRGPGPFSPPVRYRTFLRDQVSPKNFKVKMIMKTSVLLSWEFPDNYNSPTPYKIQYNGLTLDVDGRTTKKLITHLKPHTFYNFVLTNRGSSLGGLQQTVTAWTAFNLLNGKPSVAPKPDADGFIMVYLPDGQSPVPVQSYFIVMVPLRKSRGGQFLTPLGSPEDMDLEELIQDISRLQRRSLRHSRQLEVPRPYIAARFSVLPPTFHPGDQKQYGGFDNRGLEPGHRYVLFVLAVLQKSEPTFAASPFSDPFQLDNPDPQPIVDGEEGLIWVIGPVLAVVFIICIVIAILLYKKKPHSKRKDSEPRTKCLLNNADLAPHHPKDPVEMRRINFQTPDSGLRSPLREPGFHFESMLSHPPIPIADMAEHTERLKANDSLKLSQEYESIDPGQQFTWEHSNLEVNKPKNRYANVIAYDHSRVILQPIEGIMGSDYINANYVDGYRCQNAYIATQGPLPETFGDFWRMVWEQRSATIVMMTRLEEKSRIKCDQYWPNRGTETYGFIQVTLLDTIELATFCVRTFSLHKNGSSEKREVRQFQFTAWPDHGVPEYPTPFLAFLRRVKTCNPPDAGPIVVHCSAGVGRTGCFIVIDAMLERIKPEKTVDVYGHVTLMRSQRNYMVQTEDQYSFIHEALLEAVGCGNTEVPARSLYAYIQKLAQVEPGEHVTGMELEFKRLANSKAHTSRFISANLPCNKFKNRLVNIMPYESTRVCLQPIRGVEGSDYINASFIDGYRQQKAYIATQGPLAETTEDFWRMLWENNSTIVVMLTKLREMGREKCHQYWPAERSARYQYFVVDPMAEYNMPQYILREFKVTDARDGQSRTVRQFQFTDWPEQGVPKSGEGFIDFIGQVHKTKEQFGQDGPISVHCSAGVGRTGVFITLSIVLERMRYEGVVDIFQTVKMLRTQRPAMVQTEDEYQFCYQAALEYLGSFDHYAT

SEQ ID NO: 17340 - protein, 1138 aa, Artificial Sequence
  Synthetic polypeptide
AQEFEAAVSRDLTIALQAGQQMLGRPTLSVQQTPEGSLLARWEPPAGTAEDQVLGYRLQFGREDSTPLATLEFPPSEDRYTASGVHKGATYVFRLAARSRGGLGEEAAEVLSIPEDTPRGHPQILEAAGNASAGTVLLRWLPPVPAERNGAIVKYTVAVREAGALGPARETELPAAAEPGAENALTLQGLKPDTAYDLQVRAHTRRGPGPFSPPVRYRTFLRDQVSPKNFKVKMIMKTSVLLSWEFPDNYNSPTPYKIQYNGLTLDVDGRTTKKLITHLKPHTFYNFVLTNRGSSLGGLQQTVTAWTAFNLLNGKPSVAPKPDADGFIMVYLPDGQSPVPVQSYFIVMVPLRKSRGGQFLTPLGSPEDMDLEELIQDISRLQRRSLRHSRQLEVPRPYIAARFSVLPPTFHPGDQKQYGGFDNRGLEPGHRYVLFVLAVLQKSEPTFAASPFSDPFQLDNPDPQPIVDGEEGLIWVIGPVLAVVFIICIVIAILLYKNKPDSKRKDSEPRTKCLLNNADLAPHHPKDPVEMRRINFQTPDSGLRSPLREPGFHFESMLSHPPIPIADMAEHTERLKANDSLKLSQEYESIDPGQQFTWEHSNLEVNKPKNRYANVIAYDHSRVILQPIEGIMGSDYINANYVDGYRCQNAYIATQGPLPETFGDFWRMVWEQRSATIVMMTRLEEKSRIKCDQYWPNRGTETYGFIQVTLLDTIELATFCVRTFSLHKNGSSEKREVRQFQFTAWPDHGVPEYPTPFLAFLRRVKTCNPPDAGPIVVHCSAGVGRTGCFIVIDAMLERIKPEKTVDVYGHVTLMRSQRNYMVQTEDQYSFIHEALLEAVGCGNTEVPARSLYAYIQKLAQVEPGEHVTGMELEFKRLANSKAHTSRFISANLPCNKFKNRLVNIMPYESTRVCLQPIRGVEGSDYINASFIDGYRQQKAYIATQGPLAETTEDFWRMLWENNSTIVVMLTKLREMGREKCHQYWPAERSARYQYFVVDPMAEYNMPQYILREFKVTDARDGQSRTVRQFQFTDWPEQGVPKSGEGFIDFIGQVHKTKEQFGQDGPISVHCSAGVGRTGVFITLSIVLERMRYEGVVDIFQTVKMLRTQRPAMVQTEDEYQFCYQAALEYLGSFDHYAT

SEQ ID NO: 17341 - protein, 1122 aa, Artificial Sequence
  Synthetic polypeptide
AQEFEAAVSRDLTIALQAGQQMLGRPTLSVQQTPEGSLLARWEPPAGTAEDQVLGYRLQFGREDSTPLATLEFPPSEDRYTASGVHKGATYVFRLAARSRGGLGEEAAEVLSIPEDTPRGHPQILEAAGNASAGTVLLRWLPPVPAERNGAIVKYTVAVREAGALGPARETELPAAAEPGAENALTLQGLKPDTAYDLQVRAHTRRGPGPFSPPVRYRTFLRDQVSPKNFKVKMIMKTSVLLSWEFPDNYNSPTPYKIQYNGLTLDVDGRTTKKLITHLKPHTFYNFVLTNRGSSLGGLQQTVTAWTAFNLLNGKPSVAPKPDADGFIMVYLPDGQSPVPVQSYFIVMVPLRKSRGGQFLTPLGSPEDMDLEELIQDISRLQRRSLRHSRQLEVPRPYIAARFSVLPPTFHPGDQKQYGGFDNRGLEPGHRYVLFVLAVLQKSEPTFAASPFSDPFQLDNPDPQPIVDGEEGLIWVIGPVLAVVFIICIVIAILLYKNKPDSKRKDSEPRTKCLLNNADLAPHHPKDPVEMRRINFQTPGMLSHPPIPIADMAEHTERLKANDSLKLSQEYESIDPGQQFTWEHSNLEVNKPKNRYANVIAYDHSRVILQPIEGIMGSDYINANYVDGYRCQNAYIATQGPLPETFGDFWRMVWEQRSATIVMMTRLEEKSRIKCDQYWPNRGTETYGFIQVTLLDTIELATFCVRTFSLHKNGSSEKREVRQFQFTAWPDHGVPEYPTPFLAFLRRVKTCNPPDAGPIVVHCSAGVGRTGCFIVIDAMLERIKPEKTVDVYGHVTLMRSQRNYMVQTEDQYSFIHEALLEAVGCGNTEVPARSLYAYIQKLAQVEPGEHVTGMELEFKRLANSKAHTSRFISANLPCNKFKNRLVNIMPYESTRVCLQPIRGVEGSDYINASFIDGYRQQKAYIATQGPLAETTEDFWRMLWENNSTIVVMLTKLREMGREKCHQYWPAERSARYQYFVVDPMAEYNMPQYILREFKVTDARDGQSRTVRQFQFTDWPEQGVPKSGEGFIDFIGQVHKTKEQFGQDGPISVHCSAGVGRTGVFITLSIVLERMRYEGVVDIFQTVKMLRTQRPAMVQTEDEYQFCYQAALEYLGSFDHYAT

SEQ ID NO: 17342 - protein, 102 aa, Artificial Sequence
  Synthetic polypeptide
AVISPLHSRLGNRCWAAQPCRCSRPPRAACWHAGSPRLAPRRTRCWATACSLAVRTRRPWPPWSSRPPRTATRHQACTRGPRMCSGLRPGAAAAWARRQPRS

SEQ ID NO: 17343 - protein, 51 aa, Artificial Sequence
  Synthetic polypeptide
SHHCTPGWATDAGPPNPVGAADPRGQPAGTLGAPGWHRGGPGAGLPPAVWP

SEQ ID NO: 17344 - protein, 119 aa, Artificial Sequence
  Synthetic polypeptide
EQLALDPTLPRCLLCFASTASRSCPPSPWPLGLKGPEVSFCLSLQIPSMMKMRSSWPWQNSWEPSLPWWEAQSTCTACCHRWSRWPQWRRQWCGTRQWSPYGPSHTSTRPLTWRRTLCR

SEQ ID NO: 17345 - protein, 544 aa, Artificial Sequence
  Synthetic polypeptide
EQLALDPTLPRCLLCFASTASRSCPPSPWPLGLKGPEVSFCLSLQPPLESLATVEETVVRDKAVESLRAISHEHSPSDLEAHFVPLVKRLAGGDWFTSRTSACGLFSVCYPRVSSAVKAELRQYFRNLCSDDTPMVRRAAASKLGEFAKVLELDNVKSEIIPMFSNLASDEQDSVRLLAVEACVNIAQLLPQEDLEALVMPTLRQAAEDKSWRVRYMVADKFTELQKAVGPEITKTDLVPAFQNLMKDCEAEVRAAASHKVKEFCENLSADCRENVIMSQILPCIKELVSDANQHVKSALASVIMGLSPILGKDNTIEHLLPLFLAQLKDECPEVRLNIISNLDCVNEVIGIRQLSQSLLPAIVELAEDAKWRVRLAIIEYMPLLAGQLGVEFFDEKLNSLCMAWLVDHVYAIREAATSNLKKLVEKFGKEWAHATIIPKVLAMSGDPNYLHRMTTLFCINVLSEVCGQDITTKHMLPTVLRMAGDPVANVRFNVAKSLQKIGPILDNSTLQSEVKPILEKLTQDQDVDVKYFAQEALTVLSLA

SEQ ID NO: 17346 - protein, 33 aa, Artificial Sequence
  Synthetic polypeptide
QSSWLWIPHSLGACFASPQQHQEAVHHRLGPWG

SEQ ID NO: 17347 - protein, 77 aa, Artificial Sequence
  Synthetic polypeptide
RAAGFGSHTPSVLALLRLNSIKKLSTIALALGVERTRSELLPFLTATAGVAGHSGGDSGAGQGSGVLTGHLTRALAL

SEQ ID NO: 17348 - protein, 344 aa, Artificial Sequence
  Synthetic polypeptide
RAAGFGSHTPSVLALLRLNSIKKLSTIALALGVERTRSELLPFLTDTIYDEDEVLLALAEQLGTFTTLVGGPEYVHCLLPPLESLATVEETVVRDKAVESLRAISHEHSPSDLEAHFVPLVKRLAGGDWFTSRTSACGLFSVCYPRVSSAVKAELRQYFRNLCSDDTPMVRRAAASKLGEFAKVLELDNVKSEIIPMFSNLASDEQDSVRLLAVEACVNIAQLLPQEDLEALVMPTLRQAAEDKSWRVRYMVADKFTELQKAVGPEITKTDLVPAFQNLMKDCEAEVRAAASHKVKEFCENLSADCRENVIMSQILPCIKELVSDANQHVKSALASVIMGLSPI

SEQ ID NO: 17349 - protein, 578 aa, Artificial Sequence
  Synthetic polypeptide
RAAGFGSHTPSVLALLRLNSIKKLSTIALALGVERTRSELLPFLTDTIYDEDEVLLALAEQLGTFTTLVGGPEYVHCLLPPLESLATVEETVVRDKAVESLRAISHEHSPSDLEAHFVPLVKRLAGGDWFTSRTSACGLFSVCYPRVSSAVKAELRQYFRNLCSDDTPMVRRAAASKLGEFAKVLELDNVKSEIIPMFSNLASDEQDSVRLLAVEACVNIAQLLPQEDLEALVMPTLRQAAEDKSWRVRYMVADKFTELQKAVGPEITKTDLVPAFQNLMKDCEAEVRAAASHKVKEFCENLSADCRENVIMSQILPCIKELVSDANQHVKSALASVIMGLSPILGKDNTIEHLLPLFLAQLKDECPEVRLNIISNLDCVNEVIGIRQLSQSLLPAIVELAEDAKWRVRLAIIEYMPLLAGQLGVEFFDEKLNSLCMAWLVDHVYAIREAATSNLKKLVEKFGKEWAHATIIPKVLAMSGDPNYLHRMTTLFCINVLSEVCGQDITTKHMLPTVLRMAGDPVANVRFNVAKSLQKIGPILDNSTLQSEVKPILEKLTQDQDVDVKYFAQEALTVLSLA

SEQ ID NO: 17350 - protein, 11 aa, Artificial Sequence
  Synthetic polypeptide
PFLSLNSFNSR

SEQ ID NO: 17351 - protein, 35 aa, Artificial Sequence
  Synthetic polypeptide
VLIPSTVGESGSCGDSSAGPGSHGLGVPLYHHGAQ

SEQ ID NO: 17352 - protein, 83 aa, Artificial Sequence; identical to SEQ ID NO: 3894
  Synthetic polypeptide

SEQ ID NO: 17353 - protein, 15 aa, Artificial Sequence
  Synthetic polypeptide
PFLSLNSFNSACCSW

SEQ ID NO: 17354 - protein, 86 aa, Artificial Sequence; identical to SEQ ID NO: 3829
  Synthetic polypeptide

SEQ ID NO: 17355 - protein, 97 aa, Artificial Sequence
  Synthetic polypeptide
CLVFFFLYLQLPKCCLLYSLLLLVSLEVFRHSVRALLQRVSPEPPPAPRLTYEYSWSLGCGVGAGLILLLGAGCFLLLTLPSWPWGSLCPKRGHRAT

SEQ ID NO: 17356 - protein, 23 aa, Artificial Sequence
  Synthetic polypeptide
VLFFFFFISSFPNAACYIACCSW

SEQ ID NO: 17357 - protein, 27 aa, Artificial Sequence
  Synthetic polypeptide
CLVFFFLYLQLPKCCLLYSRCLACCSW

SEQ ID NO: 17358 - protein, 81 aa, Artificial Sequence
  Synthetic polypeptide
VFSLLLLVSLEVFRHSVRALLQRVSPEPPPAPRLTYEYSWSLGCGVGAGLILLLGAGCFLLLTLPSWPWGSLCPKRGHRAT

SEQ ID NO: 17359 - protein, 13 aa, Artificial Sequence
  Synthetic polypeptide
GEGERDAPASQGL

SEQ ID NO: 17360 - protein, 141 aa, Artificial Sequence
  Synthetic polypeptide
GEGERDAPASQGLKAEHLYILIGVSVVFLFCLLLLVLFCLHRQNQIKQGPPRSKDEEQKPQQRPDLAVDVLERTADKATVNGLPEKDRETDTSALAAGSSQEVTYAQLDHWALTQRTARAVSPQSTKPMAESITYAAVARH

SEQ ID NO: 17361 - protein, 12 aa, Artificial Sequence
  Synthetic polypeptide
GKEKEMHLLPKA

SEQ ID NO: 17362 - protein, 13 aa, Artificial Sequence
  Synthetic polypeptide
WGRRKRCTCFPRP

SEQ ID NO: 17363 - protein, 15 aa, Artificial Sequence
  Synthetic polypeptide
WGRRKRCTCFPRPES

SEQ ID NO: 17364 - protein, 24 aa, Artificial Sequence
  Synthetic polypeptide
IYSQDPRRGRRTTVTMSMHLLPKA

SEQ ID NO: 17365 - protein, 19 aa, Artificial Sequence
  Synthetic polypeptide
IYSQDPRRGRRTTVTMSVS

SEQ ID NO: 17366 - protein, 41 aa, Artificial Sequence
  Synthetic polypeptide
RAYGNSLYLCNSFASLNLFPGPTQRPSDNSHNEHAPASQGL

SEQ ID NO: 17367 - protein, 169 aa, Artificial Sequence
  Synthetic polypeptide
RAYGNSLYLCNSFASLNLFPGPTQRPSDNSHNEHAPASQGLKAEHLYILIGVSVVFLFCLLLLVLFCLHRQNQIKQGPPRSKDEEQKPQQRPDLAVDVLERTADKATVNGLPEKDRETDTSALAAGSSQEVTYAQLDHWALTQRTARAVSPQSTKPMAESITYAAVARH

SEQ ID NO: 17368 - protein, 35 aa, Artificial Sequence
  Synthetic polypeptide
RAYGNSLYLCNSFASLNLFPGPTQRPSDNSHNERE

SEQ ID NO: 17369 - protein, 41 aa, Artificial Sequence
  Synthetic polypeptide
SMNIRGTWMKGIWELSVPLQLFCKFKFIPRTHAEAVGQQSQ

SEQ ID NO: 17370 - protein, 14 aa, Artificial Sequence
  Synthetic polypeptide
IYSQKICPDPPSRL

SEQ ID NO: 17371 - protein, 18 aa, Artificial Sequence
  Synthetic polypeptide
IYSQKICPDPPSRLSQAP

SEQ ID NO: 17372 - protein, 30 aa, Artificial Sequence
  Synthetic polypeptide
RAYGNSLYLCNSFASLNLFPEDLPRPSISA

SEQ ID NO: 17373 - protein, 124 aa, Artificial Sequence
  Synthetic polypeptide
RAYGNSLYLCNSFASLNLFPEDLPRPSISAEPGTVIPLGSHVTFVCRGPVGVQTFRLERESRSTYNDTEDVSQASPSESEARFRIDSKPLEARTPRTQSPAPQLDPRRGRRTTVTMSMHLLPKA

SEQ ID NO: 17374 - protein, 96 aa, Artificial Sequence
  Synthetic polypeptide
RAYGNSLYLCNSFASLNLFPEDLPRPSISAEPGTVIPLGSHVTFVCRGPVGVQTFRLERESRSTYNDTEDVSQASPSESEARFRIDSVSEGNAGPY

SEQ ID NO: 17375 - protein, 284 aa, Artificial Sequence
  Synthetic polypeptide
RAYGNSLYLCNSFASLNLFPEDLPRPSISAEPGTVIPLGSHVTFVCRGPVGVQTFRLERESRSTYNDTEDVSQASPSESEARFRIDSVSEGNAGPYRCIYYKPPKWSEQSDYLELLVKETSGGPDSPDTEPGSSAGPTQRPSDNSHNEHAPASQGLKAEHLYILIGVSVVFLFCLLLLVLFCLHRQNQIKQGPPRSKDEEQKPQQRPDLAVDVLERTADKATVNGLPEKDRETDTSALAAGSSQEVTYAQLDHWALTQRTARAVSPQSTKPMAESITYAAVARH

SEQ ID NO: 17376 - protein, 150 aa, Artificial Sequence
  Synthetic polypeptide
RAYGNSLYLCNSFASLNLFPEDLPRPSISAEPGTVIPLGSHVTFVCRGPVGVQTFRLERESRSTYNDTEDVSQASPSESEARFRIDSVSEGNAGPYRCIYYKPPKWSEQSDYLELLVKETSGGPDSPDTEPGSSAGPTQRPSDNSHNERE

SEQ ID NO: 17377 - protein, 267 aa, Artificial Sequence
  Synthetic polypeptide
RAYGNSLYLCNSFASLNLFPEDLPRPSISAEPGTVIPLGSHVTFVCRGPVGVQTFRLERESRSTYNDTEDVSQASPSESEARFRIDSVSEGNAGPYRCIYYKPPKWSEQSDYLELLVKGPTQRPSDNSHNEHAPASQGLKAEHLYILIGVSVVFLFCLLLLVLFCLHRQNQIKQGPPRSKDEEQKPQQRPDLAVDVLERTADKATVNGLPEKDRETDTSALAAGSSQEVTYAQLDHWALTQRTARAVSPQSTKPMAESITYAAVARH

SEQ ID NO: 17378 - protein, 39 aa, Artificial Sequence
  Synthetic polypeptide
SMNIRGTWMKGIWELSVPLQLFCKFKFIPRRSAQTLHLG

SEQ ID NO: 17379 - protein, 29 aa, Artificial Sequence
  Synthetic polypeptide
IYSQCSAWPRPSTRRRICPDPPSRLSQAP

SEQ ID NO: 17380 - protein, 30 aa, Artificial Sequence; identical to SEQ ID NO: 6493
  Synthetic polypeptide

SEQ ID NO: 17381 - protein, 37 aa, Artificial Sequence; identical to SEQ ID NO: 6034
  Synthetic polypeptide

SEQ ID NO: 17382 - protein, 295 aa, Artificial Sequence; identical to SEQ ID NO: 2517
  Synthetic polypeptide

SEQ ID NO: 17383 - protein, 278 aa, Artificial Sequence; identical to SEQ ID NO: 2573
  Synthetic polypeptide

SEQ ID NO: 17384 - protein, 136 aa, Artificial Sequence; identical to SEQ ID NO: 3202
  Synthetic polypeptide

SEQ ID NO: 17385 - protein, 108 aa, Artificial Sequence; identical to SEQ ID NO: 3525
  Synthetic polypeptide

SEQ ID NO: 17386 - protein, 296 aa, Artificial Sequence; identical to SEQ ID NO: 2510
  Synthetic polypeptide

SEQ ID NO: 17387 - protein, 162 aa, Artificial Sequence; identical to SEQ ID NO: 3059
  Synthetic polypeptide

SEQ ID NO: 17388 - protein, 279 aa, Artificial Sequence; identical to SEQ ID NO: 2570
  Synthetic polypeptide

SEQ ID NO: 17389 - protein, 53 aa, Artificial Sequence; identical to SEQ ID NO: 5059
  Synthetic polypeptide

SEQ ID NO: 17390 - protein, 44 aa, Artificial Sequence; identical to SEQ ID NO: 5493
  Synthetic polypeptide

SEQ ID NO: 17391 - protein, 51 aa, Artificial Sequence; identical to SEQ ID NO: 5139
  Synthetic polypeptide

SEQ ID NO: 17392 - protein, 50 aa, Artificial Sequence; identical to SEQ ID NO: 5182
  Synthetic polypeptide

SEQ ID NO: 17393 - protein, 33 aa, Artificial Sequence
  Synthetic polypeptide
AFHCDKLQCSAWPRPSTRRRICPDPPSRLSQAP

SEQ ID NO: 17394 - protein, 34 aa, Artificial Sequence
  Synthetic polypeptide
AFHCDKLQCSAWPRPSTRRRKICPDPPSRLSQAP

SEQ ID NO: 17395 - protein, 41 aa, Artificial Sequence
  Synthetic polypeptide
AFHCDKLQCSAWPRPSTRRRWTLRSCSASLLEDLPRPSISA

SEQ ID NO: 17396 - protein, 278 aa, Artificial Sequence
  Synthetic polypeptide
QTAVLCLAQTIHTQEDLPRPSISAEPGTVIPLGSHVTFVCRGPVGVQTFRLERESRSTYNDTEDVSQASPSESEARFRIDSVSEGNAGPYRCIYYKPPKWSEQSDYLELLVKETSGGPDSPDTEPGSSAGPTQRPSDNSHNEHAPASQGLKAEHLYILIGVSVVFLFCLLLLVLFCLHRQNQIKQGPPRSKDEEQKPQQRPDLAVDVLERTADKATVNGLPEKDRETDTSALAAGSSQEVTYAQLDHWALTQRTARAVSPQSTKPMAESITYAAVARH

SEQ ID NO: 17397 - protein, 261 aa, Artificial Sequence
  Synthetic polypeptide
QTAVLCLAQTIHTQEDLPRPSISAEPGTVIPLGSHVTFVCRGPVGVQTFRLERESRSTYNDTEDVSQASPSESEARFRIDSVSEGNAGPYRCIYYKPPKWSEQSDYLELLVKGPTQRPSDNSHNEHAPASQGLKAEHLYILIGVSVVFLFCLLLLVLFCLHRQNQIKQGPPRSKDEEQKPQQRPDLAVDVLERTADKATVNGLPEKDRETDTSALAAGSSQEVTYAQLDHWALTQRTARAVSPQSTKPMAESITYAAVARH

SEQ ID NO: 17398 - protein, 119 aa, Artificial Sequence
  Synthetic polypeptide
QTAVLCLAQTIHTQEEDLPRPSISAEPGTVIPLGSHVTFVCRGPVGVQTFRLERESRSTYNDTEDVSQASPSESEARFRIDSKPLEARTPRTQSPAPQLDPRRGRRTTVTMSMHLLPKA

SEQ ID NO: 17399 - protein, 91 aa, Artificial Sequence
  Synthetic polypeptide
QTAVLCLAQTIHTQEEDLPRPSISAEPGTVIPLGSHVTFVCRGPVGVQTFRLERESRSTYNDTEDVSQASPSESEARFRIDSVSEGNAGPY

SEQ ID NO: 17400 - protein, 279 aa, Artificial Sequence
  Synthetic polypeptide
QTAVLCLAQTIHTQEEDLPRPSISAEPGTVIPLGSHVTFVCRGPVGVQTFRLERESRSTYNDTEDVSQASPSESEARFRIDSVSEGNAGPYRCIYYKPPKWSEQSDYLELLVKETSGGPDSPDTEPGSSAGPTQRPSDNSHNEHAPASQGLKAEHLYILIGVSVVFLFCLLLLVLFCLHRQNQIKQGPPRSKDEEQKPQQRPDLAVDVLERTADKATVNGLPEKDRETDTSALAAGSSQEVTYAQLDHWALTQRTARAVSPQSTKPMAESITYAAVARH

SEQ ID NO: 17401 - protein, 145 aa, Artificial Sequence
  Synthetic polypeptide
QTAVLCLAQTIHTQEEDLPRPSISAEPGTVIPLGSHVTFVCRGPVGVQTFRLERESRSTYNDTEDVSQASPSESEARFRIDSVSEGNAGPYRCIYYKPPKWSEQSDYLELLVKETSGGPDSPDTEPGSSAGPTQRPSDNSHNERE

SEQ ID NO: 17402 - protein, 262 aa, Artificial Sequence
  Synthetic polypeptide
QTAVLCLAQTIHTQEEDLPRPSISAEPGTVIPLGSHVTFVCRGPVGVQTFRLERESRSTYNDTEDVSQASPSESEARFRIDSVSEGNAGPYRCIYYKPPKWSEQSDYLELLVKGPTQRPSDNSHNEHAPASQGLKAEHLYILIGVSVVFLFCLLLLVLFCLHRQNQIKQGPPRSKDEEQKPQQRPDLAVDVLERTADKATVNGLPEKDRETDTSALAAGSSQEVTYAQLDHWALTQRTARAVSPQSTKPMAESITYAAVARH

SEQ ID NO: 17403 - protein, 36 aa, Artificial Sequence
  Synthetic polypeptide
QTAVLCLAQTIHTQEVDAEILLCFPPRRSAQTLHLG

SEQ ID NO: 17404 - protein, 43 aa, Artificial Sequence
  Synthetic polypeptide
WRSSNCQPGAPIWTCHPVRSEPSIVTNCSALPGPDHPHAGGGR

SEQ ID NO: 17405 - protein, 50 aa, Artificial Sequence
  Synthetic polypeptide
WRSSNCQPGAPIWTCHPVRSEPSIVTNCSALPGPDHPHAGGRSAQTLHLG

SEQ ID NO: 17406 - protein, 49 aa, Artificial Sequence
  Synthetic polypeptide
WRSSNCQPGAPIWTCHPVRSEPSIVTNCSALPGPDHPHAGGSAQTLHLG

SEQ ID NO: 17407 - protein, 34 aa, Artificial Sequence
  Synthetic polypeptide
LCCDAVSALCSAWPRPSTRRRICPDPPSRLSQAP

SEQ ID NO: 17408 - protein, 35 aa, Artificial Sequence
  Synthetic polypeptide
LCCDAVSALCSAWPRPSTRRRKICPDPPSRLSQAP

SEQ ID NO: 17409 - protein, 42 aa, Artificial Sequence
  Synthetic polypeptide
LCCDAVSALCSAWPRPSTRRRWTLRSCSASLLEDLPRPSISA

SEQ ID NO: 17410 - protein, 280 aa, Artificial Sequence
  Synthetic polypeptide
RCFCVVLCLAQTIHTQEDLPRPSISAEPGTVIPLGSHVTFVCRGPVGVQTFRLERESRSTYNDTEDVSQASPSESEARFRIDSVSEGNAGPYRCIYYKPPKWSEQSDYLELLVKETSGGPDSPDTEPGSSAGPTQRPSDNSHNEHAPASQGLKAEHLYILIGVSVVFLFCLLLLVLFCLHRQNQIKQGPPRSKDEEQKPQQRPDLAVDVLERTADKATVNGLPEKDRETDTSALAAGSSQEVTYAQLDHWALTQRTARAVSPQSTKPMAESITYAAVARH

SEQ ID NO: 17411 - protein, 263 aa, Artificial Sequence
  Synthetic polypeptide
RCFCVVLCLAQTIHTQEDLPRPSISAEPGTVIPLGSHVTFVCRGPVGVQTFRLERESRSTYNDTEDVSQASPSESEARFRIDSVSEGNAGPYRCIYYKPPKWSEQSDYLELLVKGPTQRPSDNSHNEHAPASQGLKAEHLYILIGVSVVFLFCLLLLVLFCLHRQNQIKQGPPRSKDEEQKPQQRPDLAVDVLERTADKATVNGLPEKDRETDTSALAAGSSQEVTYAQLDHWALTQRTARAVSPQSTKPMAESITYAAVARH

SEQ ID NO: 17412 - protein, 121 aa, Artificial Sequence
  Synthetic polypeptide
RCFCVVLCLAQTIHTQEEDLPRPSISAEPGTVIPLGSHVTFVCRGPVGVQTFRLERESRSTYNDTEDVSQASPSESEARFRIDSKPLEARTPRTQSPAPQLDPRRGRRTTVTMSMHLLPKA

SEQ ID NO: 17413 - protein, 93 aa, Artificial Sequence
  Synthetic polypeptide
RCFCVVLCLAQTIHTQEEDLPRPSISAEPGTVIPLGSHVTFVCRGPVGVQTFRLERESRSTYNDTEDVSQASPSESEARFRIDSVSEGNAGPY

SEQ ID NO: 17414 - protein, 281 aa, Artificial Sequence
  Synthetic polypeptide
RCFCVVLCLAQTIHTQEEDLPRPSISAEPGTVIPLGSHVTFVCRGPVGVQTFRLERESRSTYNDTEDVSQASPSESEARFRIDSVSEGNAGPYRCIYYKPPKWSEQSDYLELLVKETSGGPDSPDTEPGSSAGPTQRPSDNSHNEHAPASQGLKAEHLYILIGVSVVFLFCLLLLVLFCLHRQNQIKQGPPRSKDEEQKPQQRPDLAVDVLERTADKATVNGLPEKDRETDTSALAAGSSQEVTYAQLDHWALTQRTARAVSPQSTKPMAESITYAAVARH

SEQ ID NO: 17415 - protein, 147 aa, Artificial Sequence
  Synthetic polypeptide
RCFCVVLCLAQTIHTQEEDLPRPSISAEPGTVIPLGSHVTFVCRGPVGVQTFRLERESRSTYNDTEDVSQASPSESEARFRIDSVSEGNAGPYRCIYYKPPKWSEQSDYLELLVKETSGGPDSPDTEPGSSAGPTQRPSDNSHNERE

SEQ ID NO: 17416 - protein, 264 aa, Artificial Sequence
  Synthetic polypeptide
RCFCVVLCLAQTIHTQEEDLPRPSISAEPGTVIPLGSHVTFVCRGPVGVQTFRLERESRSTYNDTEDVSQASPSESEARFRIDSVSEGNAGPYRCIYYKPPKWSEQSDYLELLVKGPTQRPSDNSHNEHAPASQGLKAEHLYILIGVSVVFLFCLLLLVLFCLHRQNQIKQGPPRSKDEEQKPQQRPDLAVDVLERTADKATVNGLPEKDRETDTSALAAGSSQEVTYAQLDHWALTQRTARAVSPQSTKPMAESITYAAVARH

SEQ ID NO: 17417 - protein, 38 aa, Artificial Sequence
  Synthetic polypeptide
RCFCVVLCLAQTIHTQEVDAEILLCFPPRRSAQTLHLG

SEQ ID NO: 17418 - protein, 52 aa, Artificial Sequence
  Synthetic polypeptide
RTADCGWGAQVQRPPSSLPSGGSLGKLLNFAVTLFLRCALPGPDHPHAGGGR

SEQ ID NO: 17419 - protein, 59 aa, Artificial Sequence
  Synthetic polypeptide
RTADCGWGAQVQRPPSSLPSGGSLGKLLNFAVTLFLRCALPGPDHPHAGGRSAQTLHLG

SEQ ID NO: 17420 - protein, 58 aa, Artificial Sequence
  Synthetic polypeptide
RTADCGWGAQVQRPPSSLPSGGSLGKLLNFAVTLFLRCALPGPDHPHAGGSAQTLHLG

SEQ ID NO: 17421 - protein, 436 aa, Artificial Sequence
  Synthetic polypeptide
GWREWRGRNAGACRGLNRRGNRFSLEPPGGHGSDSSFILAQGDPFWTCDLRDGLSLGPRTHMQAGPLPKPTLWAEPGSVISWGNSVTIWCQGTLEAREYRLDKEESPAPWDRQNPLEPKNKARFSIPSMTEDYAGRYRCYYRSPVGWSQPSDPLELVMTGAYSKPTLSALPSPLVTSGKSVTLLCQSRSPMDTFLLIKERAAHPLLHLRSEHGAQQHQAEFPMSPVTSVHGGTYRCFSSHGFSHYLLSHPSDPLELIVSGSLEDPRPSPTRSVSTAAGPEDQPLMPTGSVPHSGLRRHWEVLIGVLVVSILLLSLLLFLLLQHWRQGKHRTLAQRQADFQRPPGAAEPEPKDGGLQRRSSPAADVQGENFCAAVKNTQPEDGVEMDTRAAASEAPQDVTYAQLHSFTLRQKATEPPPSQEGASPAEPSVYATLAIH

SEQ ID NO: 17422 - protein, 489 aa, Artificial Sequence
  Synthetic polypeptide
GWREWRGRNAGACRGLNRRGNRFSLEPPGGHGSDSSFILAQGDPFWTCDLRDGLSLGPRTHMQAGPLPKPTLWAEPGSVISWGNSVTIWCQGTLEAREYRLDKEESPAPWDRQNPLEPKNKARFSIPSMTEDYAGRYRCYYRSPVGWSQPSDPLELVMTGAYSKPTLSALPSPLVTSGKSVTLLCQSRSPMDTFLLIKERAAHPLLHLRSEHGAQQHQAEFPMSPVTSVHGGTYRCFSSHGFSHYLLSHPSDPLELIVSGSLEDPRPSPTRSVSTAAGPEDQPLMPTGSVPHSGLRRHWEVLIGVLVVSILLLSLLLFLLLQHWRQGKHRTLAQRQADFQRPPGAAEPEPKDGGLQRRSSPAADVQGENFCAAVKNTQPEDGVEMDTRQSPHDEDPQAVTYAKVKHSRPRREMASPPSPLSGEFLDTKDRQAEEDRQMDTEAAASEAPQDVTYAQLHSFTLRQKATEPPPSQEGASPAEPSVYATLAIH

SEQ ID NO: 17423 - protein, 488 aa, Artificial Sequence
  Synthetic polypeptide
GWREWRGRNAGACRGLNRRGNRFSLEPPGGHGSDSSFILAQGDPFWTCDLRDGLSLGPRTHMQAGPLPKPTLWAEPGSVISWGNSVTIWCQGTLEAREYRLDKEESPAPWDRQNPLEPKNKARFSIPSMTEDYAGRYRCYYRSPVGWSQPSDPLELVMTGAYSKPTLSALPSPLVTSGKSVTLLCQSRSPMDTFLLIKERAAHPLLHLRSEHGAQQHQAEFPMSPVTSVHGGTYRCFSSHGFSHYLLSHPSDPLELIVSGSLEDPRPSPTRSVSTAAGPEDQPLMPTGSVPHSGLRRHWEVLIGVLVVSILLLSLLLFLLLQHWRQGKHRTLAQRQADFQRPPGAAEPEPKDGGLQRRSSPAADVQGENFCAAVKNTQPEDGVEMDTRSPHDEDPQAVTYAKVKHSRPRREMASPPSPLSGEFLDTKDRQAEEDRQMDTEAAASEAPQDVTYAQLHSFTLRQKATEPPPSQEGASPAEPSVYATLAIH

SEQ ID NO: 17424 - protein, 490 aa, Artificial Sequence
  Synthetic polypeptide
GWREWRGRNAGACRGLNRRGNRFSLEPPGGHGSDSSFILAQGDPFWTCDLRDGLSLGPRTHMQAGPLPKPTLWAEPGSVISWGNSVTIWCQGTLEAREYRLDKEESPAPWDRQNPLEPKNKARFSIPSMTEDYAGRYRCYYRSPVGWSQPSDPLELVMTGAYSKPTLSALPSPLVTSGKSVTLLCQSRSPMDTFLLIKERAAHPLLHLRSEHGAQQHQAEFPMSPVTSVHGGTYRCFSSHGFSHYLLSHPSDPLELIVSGSLEDPRPSPTRSVSTAAGPEDQPLMPTGSVPHSGLRRHWEVLIGVLVVSILLLSLLLFLLLQHWRQGKHRTLAQRQADFQRPPGAAEPEPKDGGLQRRSSPAADVQGENFSGAAVKNTQPEDGVEMDTRQSPHDEDPQAVTYAKVKHSRPRREMASPPSPLSGEFLDTKDRQAEEDRQMDTEAAASEAPQDVTYAQLHSFTLRQKATEPPPSQEGASPAEPSVYATLAIH

SEQ ID NO: 17425 - protein, 440 aa, Artificial Sequence
  Synthetic polypeptide
GWREWRGRNAGACRGLNRRGNRFSLEPPGGHGSDSSFILAQGDPFWTCDLRDGLSLGPRTHMQAGPLPKPTLWAEPGSVISWGNSVTIWCQGTLEAREYRLDKEESPAPWDRQNPLEPKNKARFSIPSMTEDYAGRYRCYYRSPVGWSQPSDPLELVMTGAYSKPTLSALPSPLVTSGKSVTLLCQSRSPMDTFLLIKERAAHPLLHLRSEHGAQQHQAEFPMSPVTSVHGGTYRCFSSHGFSHYLLSHPSDPLELIVSGSLEDPRPSPTRSVSTAGPEDQPLMPTGSVPHSGLRRHWEVLIGVLVVSILLLSLLLFLLLQHWRQGKHRTLAQRQADFQRPPGAAEPEPKDGGLQRRSSPAADVQGENFCAAVKNTQPEDGVEMDTRQSPHDEDPQAVTYAKVKHSRPRREMASPPSPLSGEFLDTKDRQAEEDRQMDTE

SEQ ID NO: 17426 - protein, 25 aa, Artificial Sequence
  Synthetic polypeptide
PPGRAESGPQDPHAGRAPPQTHPLG

SEQ ID NO: 17427 - protein, 14 aa, Artificial Sequence
  Synthetic polypeptide
PRETHFGLVTSGTG

SEQ ID NO: 17428 - protein, 63 aa, Artificial Sequence; identical to SEQ ID NO: 4566
  Synthetic polypeptide

SEQ ID NO: 17429 - protein, 41 aa, Artificial Sequence; identical to SEQ ID NO: 5729
  Synthetic polypeptide

SEQ ID NO: 17430 - protein, 358 aa, Artificial Sequence; identical to SEQ ID NO: 2336
  Synthetic polypeptide

SEQ ID NO: 17431 - protein, 411 aa, Artificial Sequence; identical to SEQ ID NO: 2222
  Synthetic polypeptide

SEQ ID NO: 17432 - protein, 410 aa, Artificial Sequence; identical to SEQ ID NO: 2226
  Synthetic polypeptide

SEQ ID NO: 17433 - protein, 412 aa, Artificial Sequence; identical to SEQ ID NO: 2213
  Synthetic polypeptide

SEQ ID NO: 17434 - protein, 362 aa, Artificial Sequence; identical to SEQ ID NO: 2322
  Synthetic polypeptide

SEQ ID NO: 17435 - protein, 57 aa, Artificial Sequence
  Synthetic polypeptide
MQVAYRGWKSQGTDSPESPEGTKPCRSPQKTFPPGPPRSPGEIRRDSHPAVLVRCHV

SEQ ID NO: 17436 - protein, 385 aa, Artificial Sequence
  Synthetic polypeptide
RWRKSRSHECRWPIEAGKVKELILLSLQRERSPAGVHRKPSLLAHPGRLVKSEETVILQCWSDVMFEHFLLHREGMFNDTLRLIGEHHDGVSKANFSISRMTQDLAGTYRCYGSVTHSPYQVSAPSDPLDIVIIGLYEKPSLSAQLGPTVLAGENVTLSCSSRSSYDMYHLSREGEAHERRLPAGPKVNGTFQADFPLGPATHGGTYRCFGSFHDSPYEWSKSSDPLLVSVTGNPSNSWPSPTEPSSKTERMFHHVGQACLKLPTSSDPTVSACQSNPRHLHILIGTSVVIILFILLFFLLHRWCSNKKNAAVMDQESAGNRTANSEDSDEQDPQEVTYTQLNHCVFTQRKITRPSQRPKTPPTDIIVYTELPNAESRSKVVSCP

SEQ ID NO: 17437 - protein, 359 aa, Artificial Sequence
  Synthetic polypeptide
RWRKSRSHECRWPIEAGKVKELILLSLQRERSPAGVHRKPSLLAHPGRLVKSEETVILQCWSDVMFEHFLLHREGMFNDTLRLIGEHHDGVSKANFSISRMTQDLAGTYRCYGSVTHSPYQVSAPSDPLDIVIIGLYEKPSLSAQLGPTVLAGENVTLSCSSRSSYDMYHLSREGEAHERRLPAGPKVNGTFQADFPLGPATHGGTYRCFGSFHDSPYEWSKSSDPLLVSVTGNPSNSWPSPTEPSSKTGNPRHLHILIGTSVVIILFILLFFLLHRWCSNKKNAAVMDQESAGNRTANSEDSDEQDPQEVTYTQLNHCVFTQRKITRPSQRPKTPPTDIIVYTELPNAESRSKVVSCP

SEQ ID NO: 17438 - protein, 24 aa, Artificial Sequence
  Synthetic polypeptide
VSRGNEALQESTENLPSWPTQVAW

SEQ ID NO: 17439 - protein, 410 aa, Artificial Sequence
  Synthetic polypeptide
FLKQNKRTRSIEFSEATAELTVSFTNEVFTTETSRSITASPKESDSPAGESCPPVLHQGQPGPDMPRGCDPNNPGGVSGRGLAQPEEAPAAQGQGCAEAASAPPAPPADPEIKRGSGWRPTGCSQPRVMFMTAEPQARSYPREGSWHGRRLKDWRVWSVEAGGQRLQLWKRGHAASSWCSIREPFGQCLSVCLPLCLRAPSIWDGRNLWRPHPPPCTLWMTWYPGWTTYWPLSSTSLIWAPDGSLRFPALRVDSVPSSVQNPPVLPFGPLCSCLVFPRNSHPHSISHCGLTNLLSSLRTGLAGSLGMSFIFLSVKLARCPLPFTLENKISLCNMVKPHLYQQNKKTQKLARCGGASLYSQQLRGLRWENGLSLGGRGCSELRSHHCTLARVTKPDFVSKNTGMNMSITLI

SEQ ID NO: 17440 - protein, 129 aa, Artificial Sequence
  Synthetic polypeptide
FLKQNKRTRSIEFSEATAELTVSFTNEVFTTETSRSITASPKESDSPAGPARQYYTKGNLVRICLGAVILIILAGFLAEDWHSRRKRLRHRGRAVQRPLPPLPPLPLTRKSNGGQDGGRQDVHSRGLCS

SEQ ID NO: 17441 - protein, 17 aa, Artificial Sequence
  Synthetic polypeptide
NKTNGQEVLNSQKPPLN

SEQ ID NO: 17442 - protein, 65 aa, Artificial Sequence
  Synthetic polypeptide
LPPLFPASLPSTASLASSLLLEWTSLAASLLLSGSFCQTLALSPARPGGVVRRGRNPTVSDSVWL

SEQ ID NO: 17443 - protein, 98 aa, Artificial Sequence
  Synthetic polypeptide
NGPAWLPHYFFQGVFAKPSLSAQPGPAVSSGGDVTLQCQTRYGFDQFALYKEGDPAPYKNPERWYRASFPIITVTAAHSGTYRCYSFSSRDPYLWSAP

SEQ ID NO: 17444 - protein, 225 aa, Artificial Sequence
  Synthetic polypeptide
NGPAWLPHYFFQGVFAKPSLSAQPGPAVSSGGDVTLQCQTRYGFDQFALYKEGDPAPYKNPERWYRASFPIITVTAAHSGTYRCYSFSSRDPYLWSAPSDPLELVVTEFSEATAELTVSFTNEVFTTETSRSITASPKESDSPAGPARQYYTKGNLVRICLGAVILIILAGFLAEDWHSRRKRLRHRGRAVQRPLPPLPPLPLTRKSNGGQDGGRQDVHSRGLCS

SEQ ID NO: 17445 - protein, 524 aa, Artificial Sequence
  Synthetic polypeptide
NGPAWLPHYFFQGVFAKPSLSAQPGPAVSSGGDVTLQCQTRYGFDQFALYKEGDPAPYKNPERWYRASFPIITVTAAHSGTYRCYSFSSRDPYLWSAPSDPLELVVTGTSVTPSRLPTEPPSPVAEFSEATAELTVSFTNEVFTTETSRSITASPKESDSPAGESCPPVLHQGQPGPDMPRGCDPNNPGGVSGRGLAQPEEAPAAQGQGCAEAASAPPAPPADPEIKRGSGWRPTGCSQPRVMFMTAEPQARSYPREGSWHGRRLKDWRVWSVEAGGQRLQLWKRGHAASSWCSIREPFGQCLSVCLPLCLRAPSIWDGRNLWRPHPPPCTLWMTWYPGWTTYWPLSSTSLIWAPDGSLRFPALRVDSVPSSVQNPPVLPFGPLCSCLVFPRNSHPHSISHCGLTNLLSSLRTGLAGSLGMSFIFLSVKLARCPLPFTLENKISLCNMVKPHLYQQNKKTQKLARCGGASLYSQQLRGLRWENGLSLGGRGCSELRSHHCTLARVTKPDFVSKNTGMNMSITLI

SEQ ID NO: 17446 - protein, 243 aa, Artificial Sequence
  Synthetic polypeptide
NGPAWLPHYFFQGVFAKPSLSAQPGPAVSSGGDVTLQCQTRYGFDQFALYKEGDPAPYKNPERWYRASFPIITVTAAHSGTYRCYSFSSRDPYLWSAPSDPLELVVTGTSVTPSRLPTEPPSPVAEFSEATAELTVSFTNEVFTTETSRSITASPKESDSPAGPARQYYTKGNLVRICLGAVILIILAGFLAEDWHSRRKRLRHRGRAVQRPLPPLPPLPLTRKSNGGQDGGRQDVHSRGLCS

SEQ ID NO: 17447 - protein, 54 aa, Artificial Sequence
  Synthetic polypeptide
PSPLPCLTPLHSITGLLSATRMDQPGCLITSFREFLPNPRSQPSPARRCRQEGT

SEQ ID NO: 17448 - protein, 23 aa, Artificial Sequence
  Synthetic polypeptide
KCRHSLHYRRRPWLQDTPHLLLE

SEQ ID NO: 17449 - protein, 249 aa, Artificial Sequence
  Synthetic polypeptide
PNAGTVFTTVEDLGSKILLTCSLNDSATEVTGHRWLKGGVVLKEDALPGQKTEFKVDSDDQWGEYSCVFLPEPMGTANIQLHGPPRVKAVKSSEHINEGETAMLVCKSESVPPVTDWAWYKITDSEDKALMNGSESRFFVSSSQGRSELHIENLNMEADPGQYRCNGTSSKGSDQAIITLRVRSHLAALWPFLGIVAEVLVLVTIIFIYEKRRKPEDVLDDDDAGSAPLKSSGQHQNDKGKNVRQRNSS

SEQ ID NO: 17450 - protein, 9 aa, Artificial Sequence
  Synthetic polypeptide
QMPAQSSLP

SEQ ID NO: 17451 - protein, 272 aa, Artificial Sequence
  Synthetic polypeptide
KKRMLMCNKKSSEGVKLTGKRIPQTMAAFGLKYLLNDTGCKFVFYYHRVGTRVSLSTICLLNGFQAIKLNPSICRWMEIKIRSPRFIDFCCLLCWAPHVLMNASVLLLVNGPLNSKNSSAKNNYGYCSYKASKRFSSLHAVLYFSPDFMSLGFMVWASGSMVFFLYRHKQQVQHNHSNRLSCRPSQEARATHTIMVLVSSFFVFYSVHSFLTIWTTVVANPGQWIVTNSVLVASCFPARSPFVLIMSDTHISQFCFACRTRKTLFPNLVVMP

SEQ ID NO: 17452 - protein, 86 aa, Artificial Sequence
  Synthetic polypeptide
KKRMLMCNKKSSEGVKLTGKRIPQTMAAFGLKYLLNDTGYTSSKSNTITATDSPADLPRKPEPHTPSWSWKKQAMSIRTVLWHPTG

SEQ ID NO: 17453 - protein, 15 aa, Artificial Sequence
  Synthetic polypeptide
NLLAKGYLRQWQLLD

SEQ ID NO: 17454 - protein, 23 aa, Artificial Sequence
  Synthetic polypeptide
RSKTYWQKDTSDNGSFWIEIFAE

SEQ ID NO: 17455 - protein, 20 aa, Artificial Sequence
  Synthetic polypeptide
DQLPSPDLDLVDPEAEAFQC

SEQ ID NO: 17456 - protein, 146 aa, Artificial Sequence
  Synthetic polypeptide
GRAWWLTPVIPALWEAEAGGSPEINSLLLTWTLWILRQRLSSVNAEVSTLKDTRLLTFKAFAQLFILGCSWVLGIFQIGPVAGVMAYLFTIINSLQGAFIFLIHCLLNGQVREEYKRWITGKTKPSSQSQTSRILLSSMPSASKTG

SEQ ID NO: 17457 - protein, 19 aa, Artificial Sequence
  Synthetic polypeptide
SQHFGRLRRVDHLRSTPFS

SEQ ID NO: 17458 - protein, 34 aa, Artificial Sequence; identical to SEQ ID NO: 6165
  Synthetic polypeptide

SEQ ID NO: 17459 - protein, 512 aa, Artificial Sequence; identical to SEQ ID NO: 2012
  Synthetic polypeptide

SEQ ID NO: 17460 - protein, 132 aa, Artificial Sequence; identical to SEQ ID NO: 3248
  Synthetic polypeptide

SEQ ID NO: 17461 - protein, 30 aa, Artificial Sequence; identical to SEQ ID NO: 6432
  Synthetic polypeptide

SEQ ID NO: 17462 - protein, 99 aa, Artificial Sequence
  Synthetic polypeptide
ASSHPERSAPQGRGFLSVLFVIGLMWLRTGLGIQVVLTEQPSQPQCLRRHSPAATAGPASAPRHPVPGHGLGPRGCPRPPSPGPAGAQCHRGHLLLPAT

SEQ ID NO: 17463 - protein, 10 aa, Artificial Sequence
  Synthetic polypeptide
NGTGHTGGAH

SEQ ID NO: 17464 - protein, 170 aa, Artificial Sequence
  Synthetic polypeptide
PPPTQKDQLPRAEDFCLCCSLLDSCGLERDWAYRWCSLSSPANLSASVATVQLPQQDQPVPHGTQCLAMGWGRVGAHDPPAQVLQELNVTVVTFFCRPHNICTFVPRRKAGICFGDSGGPLICDGIIQGIDSFVIWGCATRLFPDFFTRVALYVDWIRSTLRRVEAKGRP

SEQ ID NO: 17465 - protein, 207 aa, Artificial Sequence
  Synthetic polypeptide
GAARSCRFRGRHYKREFRLEGEPVALRCPQVPYWLWASVSPRINLTWHKNDSARTVPGEEETRMWAQDGALWLLPALQEDSGTYVCTTRNASYCDKMSIELRVFENTDAFLPFISYPQILTLSTSGVLVCPDLSEFTRDKTDVKIQWYKDSLLLDKDNEKFLSVRGTTHLLVHDVALEDAGYYRCVLTFAHEGQQYNITRSIELRIK

SEQ ID NO: 17466 - protein, 274 aa, Artificial Sequence
  Synthetic polypeptide
GAARSCRFRGRHYKREFRLEGEPVALRCPQVPYWLWASVSPRINLTWHKNDSARTVPGEEETRMWAQDGALWLLPALQEDSGTYVCTTRNASYCDKMSIELRVFENTDAFLPFISYPQILTLSTSGVLVCPDLSEFTRDKTDVKIQWYKDSLLLDKDNEKFLSVRGTTHLLVHDVALEDAGYYRCVLTFAHEGQQYNITRSIELRIKKKKEETIPVIISPLKTISASLGSRLTIPCKVFLGTGTPLTTMLWWTANDTHIESAYPGGRVTEGPRQ

SEQ ID NO: 17467 - protein, 376 aa, Artificial Sequence
  Synthetic polypeptide
GAARSCRFRGRHYKREFRLEGEPVALRCPQVPYWLWASVSPRINLTWHKNDSARTVPGEEETRMWAQDGALWLLPALQEDSGTYVCTTRNASYCDKMSIELRVFENTDAFLPFISYPQILTLSTSGVLVCPDLSEFTRDKTDVKIQWYKDSLLLDKDNEKFLSVRGTTHLLVHDVALEDAGYYRCVLTFAHEGQQYNITRSIELRIKKKKEETIPVIISPLKTISASLGSRLTIPCKVFLGTGTPLTTMLWWTANDTHIESAYPGGRVTEGPRQEYSENNENYIEVPLIFDPVTREDLHMDFKCVVHNTLSFQTLRTTVKEASSTFSWGIVLAPLSLAFLVLGGIWMHRRCKHRTGKADGLTVLWPHHQDFQSYPK

SEQ ID NO: 17468 - protein, 53 aa, Artificial Sequence
  Synthetic polypeptide
RDPRLYKKKKKKSSWAWWCVPVDLATWEAEGLPEAAGFVGGITSGSSGWKGSL

SEQ ID NO: 17469 - protein, 55 aa, Artificial Sequence
  Synthetic polypeptide
TWLLGRLRGCQKLPVSWEALQAGVQAGRGACSPEVPPGALLVVGLCQPPHQPDMA

SEQ ID NO: 17470 - protein, 36 aa, Artificial Sequence
  Synthetic polypeptide
FQHFGSLRQADHLRPGVRDQAGHHGSSLLGVAPRHL

SEQ ID NO: 17471 - protein, 32 aa, Artificial Sequence
  Synthetic polypeptide
GQEFETRLATTGALFWAWLHGTCRRRGFPYHR

SEQ ID NO: 17472 - protein, 88 aa, Artificial Sequence
  Synthetic polypeptide
GWVRWLTPVIPTLWESEAGGSLEARSSRPGWPPRELSFGRGSTAPVGGGAFPTIVEREPWDGRDGELPVEDDIDLSDVELDDLGKDEL

SEQ ID NO: 17473 - protein, 24 aa, Artificial Sequence
  Synthetic polypeptide
FLYPPSHSEDEICVTQVAELVKPL

SEQ ID NO: 17474 - protein, 25 aa, Artificial Sequence
  Synthetic polypeptide
MVHSDSYTLRVILKMKYVSHRWQNW

SEQ ID NO: 17475 - protein, 330 aa, Artificial Sequence
  Synthetic polypeptide
NMCHTGGRTGEAIVDAALSALRQLVKDRLGGRSGGYSSGKQGRSDSSSKKDVIELTDDSFDKNVLDSEDVWMVEFYAPWCGHCKNLEPEWAAAASEVKEQTKGKVKLAAVDATVNQVLASRYGIRGFPTIKIFQKGESPVDYDGGRTRSDIVSRALDLFSDNAPPPELLEIINEDIAKRTCEEHQLCVVAVLPHILDTGAAGRNSYLEVLLKLADKYKKKMWGWLWTEAGAQSELETALGIGGFGYPAMAAINARKMKFALLKGSFSEQGINEFLRELSFGRGSTAPVGGGAFPTIVEREPWDGRDGELPVEDDIDLSDVELDDLGKDEL

SEQ ID NO: 17476 - protein, 251 aa, Artificial Sequence
  Synthetic polypeptide
IQNQCTKITSILIHQQQTESQIMSELPFTIASKRIKYLGIQLTRDVKDLFKENYKPLLKEIKEDTNKWKNIPCSWVGRINIVKMAILPKVIYRFNAIPIKLPMTFFTELEKTTLKFIWNQKRARIAKAILSQKNKAGGITLPDFKLYYKATVTKTAWYWYQNRDIDQWNRTEPSEITLPVYNYLIFDKPEKNKQWGKESLFNKWCWENCLAICRKLKLDPFLTPYTKINSRWIKDLNVRPKTIKTLEENVW

SEQ ID NO: 17477 - protein, 19 aa, Artificial Sequence
  Synthetic polypeptide
KKTSGELYLLSGSEWSVFL

SEQ ID NO: 17478 - protein, 442 aa, Artificial Sequence
  Synthetic polypeptide
NHKNPRRKRLVSCTFFLAVNGLYSSSDDVIELTPSNFNREVIQSDSLWLVEFYAPWCGHCQRLTPEWKKAATALKDVVKVGAVDADKHHSLGGQYGVQGFPTIKIFGSNKNRPEDYQGGRTGEAIVDAALSALRQLVKDRLGGRSGGYSSGKQGRSDSSSKKDVIELTDDSFDKNVLDSEDVWMVEFYAPWCGHCKNLEPEWAAAASEVKEQTKGKVKLAAVDATVNQVLASRYGIRGFPTIKIFQKGESPVDYDGGRTRSDIVSRALDLFSDNAPPPELLEIINEDIAKRTCEEHQLCVVAVLPHILDTGAAGRNSYLEVLLKLADKYKKKMWGWLWTEAGAQSELETALGIGGFGYPAMAAINARKMKFALLKGSFSEQGINEFLRELSFGRGSTAPVGGGAFPTIVEREPWDGRDGELPVEDDIDLSDVELDDLGKDEL

SEQ ID NO: 17479 - protein, 434 aa, Artificial Sequence
  Synthetic polypeptide
GLVSCTFFLAVNGLYSSSDDVIELTPSNFNREVIQSDSLWLVEFYAPWCGHCQRLTPEWKKAATALKDVVKVGAVDADKHHSLGGQYGVQGFPTIKIFGSNKNRPEDYQGGRTGEAIVDAALSALRQLVKDRLGGRSGGYSSGKQGRSDSSSKKDVIELTDDSFDKNVLDSEDVWMVEFYAPWCGHCKNLEPEWAAAASEVKEQTKGKVKLAAVDATVNQVLASRYGIRGFPTIKIFQKGESPVDYDGGRTRSDIVSRALDLFSDNAPPPELLEIINEDIAKRTCEEHQLCVVAVLPHILDTGAAGRNSYLEVLLKLADKYKKKMWGWLWTEAGAQSELETALGIGGFGYPAMAAINARKMKFALLKGSFSEQGINEFLRELSFGRGSTAPVGGGAFPTIVEREPWDGRDGELPVEDDIDLSDVELDDLGKDEL

SEQ ID NO: 17480 - protein, 24 aa, Artificial Sequence
  Synthetic polypeptide
RARWLTPVIPALWKAEAGGSSEVW

SEQ ID NO: 17481 - protein, 30 aa, Artificial Sequence
  Synthetic polypeptide
SQHFGRPKRVDHLRSGELYLLSGSEWSVFL

SEQ ID NO: 17482 - protein, 830 aa, Artificial Sequence
  Synthetic polypeptide
AKSPANIIMTGSNSHITILTLNINGLNSAIKRHRLASWIKSQDPSVCCIQETHLTCRDTHRLKIKGWRKIYQANGKQKKAGVAILVSDKTDFKPTKIKRDKEGHYIMVKGSIQQEELTFLNIYAPNTGAPRFIKQVLSDLQRDLDSHTLIMGDFNTPLSTLDRSTRQKVNKDTQELNSALHQADLIDIYRTLHPKSTEYTFFSAPHHTYSKIDHIVGSKALLSKCKRTEIITNYLSDHSAIKLELRIKTLTQSRSTTWKLNNLLLNDYWVHNEMKAEIKMFFETNENKDTTYQNLWDAFKAVCRGKFIALNAYKRKQERSKIDTLTSQLKELEKQEQTHSKASRRQEITKIRAELKEIETQKTLQKINESRSWFFERINKIDRPLARLIKKKREKNQIDTIKNDKGDITTDPTEIQTTIREYYKHLYANKLENLEEMDTFLDTYTLPRLNQEEVESLNRPITGSEIVAIINSLPTKKSPGPDGFTAEFYQRYKEELVPFLLKLFQSIEKEGILPNSFYEASIILIPKPGRDTTKKENFRPISLMNIDAKILNKILANRIQQHIKKLIHHDQVGFIPGMQGWFNIRKSINVIQHINRAKGKNHMIISIDAEKAFDKIQQPFMLKTLNKLGIDGTYFKIIRAIYDKPTANIILNGQKLEAFPLKTGTRQGCPLSPLLFNIVLEVLARAIRQEKEIKGIQLGKEEVKLSLFADDMIVYLENPIVSAQNLLKLISNFSKVSGYKINVQKSQAFLYTNNRQTESQIMGELPFTIASKRIKYLGIQLTRDVKDLFKENYKPLLKEIKEDTNKWKNIPCSWVGRINIVKMAILPKVW

SEQ ID NO: 17483 - protein, 23 aa, Artificial Sequence
  Synthetic polypeptide
KWPYCPRSGELYLLSGSEWSVFL

SEQ ID NO: 17484 - protein, 498 aa, Artificial Sequence
  Synthetic polypeptide
TPIHNCFKENKIPRNPTYKGCEGPLQGELQTTAQGNKRGHKQMEEHSMLMGRKNQYRENGHTAQGLVSCTFFLAVNGLYSSSDDVIELTPSNFNREVIQSDSLWLVEFYAPWCGHCQRLTPEWKKAATALKDVVKVGAVDADKHHSLGGQYGVQGFPTIKIFGSNKNRPEDYQGGRTGEAIVDAALSALRQLVKDRLGGRSGGYSSGKQGRSDSSSKKDVIELTDDSFDKNVLDSEDVWMVEFYAPWCGHCKNLEPEWAAAASEVKEQTKGKVKLAAVDATVNQVLASRYGIRGFPTIKIFQKGESPVDYDGGRTRSDIVSRALDLFSDNAPPPELLEIINEDIAKRTCEEHQLCVVAVLPHILDTGAAGRNSYLEVLLKLADKYKKKMWGWLWTEAGAQSELETALGIGGFGYPAMAAINARKMKFALLKGSFSEQGINEFLRELSFGRGSTAPVGGGAFPTIVEREPWDGRDGELPVEDDIDLSDVELDDLGKDEL

SEQ ID NO: 17485 - protein, 38 aa, Artificial Sequence
  Synthetic polypeptide
DAGEIGRPFVEEIPTESWNWEVTALHRETGRELLLLCW

SEQ ID NO: 17486 - protein, 244 aa, Artificial Sequence
  Synthetic polypeptide
ILELGSNSPPQRNWKGIAIALLVILVVCSLITMSVILLTPDELTNSSETRLSLEDLFRKDFVLHDPEARWINDTDVVYKSENGHVIKLNIETNATTLLLENTTFVTFKASRHSVSPDLKYVLLAYDVKQIFHYSYTASYVIYNIHTREVWELNPPEVEDSVLQYAAWGVQGQQLIYIFENNIYYQPDIKSSSLRLTSSGKEEIIFNGIADWLYEEELLHSHIAHWWSPDGERLAFLMINDSLVP

SEQ ID NO: 17487 - protein, 778 aa, Artificial Sequence
  Synthetic polypeptide
ILELGSNSPPQRNWKGIAIALLVILVVCSLITMSVILLTPDELTNSSETRLSLEDLFRKDFVLHDPEARWINDTDVVYKSENGHVIKLNIETNATTLLLENTTFVTFKASRHSVSPDLKYVLLAYDVKQIFHYSYTASYVIYNIHTREVWELNPPEVEDSVLQYAAWGVQGQQLIYIFENNIYYQPDIKSSSLRLTSSGKEEIIFNGIADWLYEEELLHSHIAHWWSPDGERLAFLMINDSLVPTMVIPRFTGALYPKGKQYPYPKAGQVNPTIKLYVVNLYGPTHTLELMPPDSFKSREYYITMVKWVSNTKTVVRWLNRAQNISILTVCETTTGACSKKYEMTSDTWLSQQNEEPVFSRDGSKFFMTVPVKQGGRGEFHHVAMFLIQSKSEQITVRHLTSGNWEVIKILAYDETTQKIYFLSTESSPRGRQLYSASTEGLLNRQCISCNFMKEQCTYFDASFSPMNQHFLLFCEGPRVPVVSLHSTDNPAKYFILESNSMLKEAILKKKIGKPEIKILHIDDYELPLQLSLPKDFMDRNQYALLLIMDEEPGGQLVTDKFHIDWDSVLIDMDNVIVARFDGRGSGFQGLKILQEIHRRLGSVEVKDQITAVKFLLKLPYIDSKRLSIFGKGYGGYIASMILKSDEKLFKCGSVVAPITDLKLYASAFSERYLGMPSKEESTYQAASVLHNVHGLKEENILIIHGTADTKVHFQHSAELIKHLIKAGVNYTMQVYPDEGHNVSEKSKYHLYSTILKFFSDCLKEEISVLPQEPEEDE

SEQ ID NO: 17488 - protein, 25 aa, Artificial Sequence
  Synthetic polypeptide
KLTKMLEKLGDHLLKKYLLNLGTGK

SEQ ID NO: 17489 - protein, 7 aa, Artificial Sequence
  Synthetic polypeptide
KPVQKLR

SEQ ID NO: 17490 - protein, 65 aa, Artificial Sequence
  Synthetic polypeptide
MDLKGIILSDKSQSKSLDELTNSSETRLSLEDLFRKDFVLHDPEARWINDTDVVYKSENGHVIKL

SEQ ID NO: 17491 - protein, 69 aa, Artificial Sequence
  Synthetic polypeptide
MDLKGIILSDKSQSKSLDELTNSSETRLSLEDLFRKDFVLHDPEARWINDTDVVYKSENGHVIKLNIET

SEQ ID NO: 17492 - protein, 106 aa, Artificial Sequence
  Synthetic polypeptide
MDLKGIILSDKSQSKSLDELTNSSETRLSLEDLFRKDFVLHDPEARWINDTDVVYKSENGHVIKLNIETNATTLLLENTTFVTFKASRHSVSPDLKYVLLAYDVKQ

SEQ ID NO: 17493 - protein, 221 aa, Artificial Sequence
  Synthetic polypeptide
MDLKGIILSDKSQSKSLDELTNSSETRLSLEDLFRKDFVLHDPEARWINDTDVVYKSENGHVIKLNIETNATTLLLENTTFVTFKASRHSVSPDLKYVLLAYDVKQIFHYSYTASYVIYNIHTREVWELNPPEVEDSVLQYAAWGVQGQQLIYIFENNIYYQPDIKSSSLRLTSSGKEEIIFNGIADWLYEEELLHSHIAHWWSPDGERLAFLMINDSLVP

SEQ ID NO: 17494 - protein, 755 aa, Artificial Sequence
  Synthetic polypeptide
MDLKGIILSDKSQSKSLDELTNSSETRLSLEDLFRKDFVLHDPEARWINDTDVVYKSENGHVIKLNIETNATTLLLENTTFVTFKASRHSVSPDLKYVLLAYDVKQIFHYSYTASYVIYNIHTREVWELNPPEVEDSVLQYAAWGVQGQQLIYIFENNIYYQPDIKSSSLRLTSSGKEEIIFNGIADWLYEEELLHSHIAHWWSPDGERLAFLMINDSLVPTMVIPRFTGALYPKGKQYPYPKAGQVNPTIKLYVVNLYGPTHTLELMPPDSFKSREYYITMVKWVSNTKTVVRWLNRAQNISILTVCETTTGACSKKYEMTSDTWLSQQNEEPVFSRDGSKFFMTVPVKQGGRGEFHHVAMFLIQSKSEQITVRHLTSGNWEVIKILAYDETTQKIYFLSTESSPRGRQLYSASTEGLLNRQCISCNFMKEQCTYFDASFSPMNQHFLLFCEGPRVPVVSLHSTDNPAKYFILESNSMLKEAILKKKIGKPEIKILHIDDYELPLQLSLPKDFMDRNQYALLLIMDEEPGGQLVTDKFHIDWDSVLIDMDNVIVARFDGRGSGFQGLKILQEIHRRLGSVEVKDQITAVKFLLKLPYIDSKRLSIFGKGYGGYIASMILKSDEKLFKCGSVVAPITDLKLYASAFSERYLGMPSKEESTYQAASVLHNVHGLKEENILIIHGTADTKVHFQHSAELIKHLIKAGVNYTMQVYPDEGHNVSEKSKYHLYSTILKFFSDCLKEEISVLPQEPEEDE

SEQ ID NO: 17495 - protein, 81 aa, Artificial Sequence
  Synthetic polypeptide
IVALRIPMCHGRDLVEGNRIVGAGFSHAVLVIVNKSHEIWWFHKREFPCMCPPAHRHVRSPFALSSSSTMIVRPLSYVKLL

SEQ ID NO: 17496 - protein, 377 aa, Artificial Sequence
  Synthetic polypeptide
NCCEGMWDNISCWPSSVPGRMVEVECPRFLRMLTSRNGSLFRNCTQDGWSETFPRPNLACGVNVNDSSNEKRHSYLLKLKVMYTVGYSSSLVMLLVALGILCAFRRLHCTRNYIHMHLFVSFILRALSNFIKDAVLFSSDDVTYCDAHRAGCKLVMVLFQYCIMANYSWLLVEGLYLHTLLAISFFSERKYLQGFVAFGWGSPAIFVALWAIARHFLEDVGCWDINANASIWWIIRGPVILSILINFILFINILRILMRKLRTQETRGNEVSHYKRLARSTLLLIPLFGIHYIVFAFSPEDAMEIQLFFELALGSFQGLVVAVLYCFLNGEVQLEVQKKWQQWHLREFPLHPVASFSNSTKASHLEQSQGTCRTSII

SEQ ID NO: 17497 - protein, 44 aa, Artificial Sequence
  Synthetic polypeptide
TGVSLHVSSCPPPCKKSLCSFFVFHHDCETSQLCETVVRGCGTT

SEQ ID NO: 17498 - protein, 91 aa, Artificial Sequence
  Synthetic polypeptide
CPGPSHSLTPHSWLHPEQLPVLKALFMVECVRGARPGRSQLWDPPVLHSPGWHRLAAGGLSQHQGADTSEHEDGEQMLLSFRPGCAYGVGK

SEQ ID NO: 17499 - protein, 70 aa, Artificial Sequence
  Synthetic polypeptide
KETVMSWTFTFTHSSLMASPRTTSSPEGSIHGGMRSRCSPWTESALGSSGFTQPRMAPTGCGRSQPTSGS

SEQ ID NO: 17500 - protein, 304 aa, Artificial Sequence
  Synthetic polypeptide
RLYSWWNAFEVLALDGVSSGILRFYTAQDGTDWLRAVSANIRELTLQNMKMANKCCSPSDQVVHMGWVNEKLQGADSSQTFRPKFLALKGPSFYVFSTPPVSTFDWVRAERTYHLCEVLFKVHKFWLTEDCWLQANLYLGLQDFDFEDQRPYCFSIVAGHGKSHVFNVELGSELAMWEKSFQRATFMEVQRTGSRTYMCSWQGEMLCFTVDFALGFTCFESKTKNVLWRFKFSQLKGSSDDGKTRVKLLFQNLDTKQIETKELEFQDLRAVLHCIHSFIAAKVASVDPGFMDSQSLARKYMYSS

SEQ ID NO: 17501 - protein, 283 aa, Artificial Sequence
  Synthetic polypeptide
CPGPSHSLTPHSWLHPEQLPVLKALFMMKMANKCCSPSDQVVHMGWVNEKLQGADSSQTFRPKFLALKGPSFYVFSTPPVSTFDWVRAERTYHLCEVLFKVHKFWLTEDCWLQANLYLGLQDFDFEDQRPYCFSIVAGHGKSHVFNVELGSELAMWEKSFQRATFMEVQRTGSRTYMCSWQGEMLCFTVDFALGFTCFESKTKNVLWRFKFSQLKGSSDDGKTRVKLLFQNLDTKQIETKELEFQDLRAVLHCIHSFIAAKVASVDPGFMDSQSLARKYMYSS

SEQ ID NO: 17502 - protein, 52 aa, Artificial Sequence
  Synthetic polypeptide
KETVMSWTFTFTHSSLMASPRTTSSPEGSIHDEDGEQMLLSFRPGCAYGVGK

SEQ ID NO: 17503 - protein, 25 aa, Artificial Sequence
  Synthetic polypeptide
ALVGWYKKHQKASKNWFTLLSASSS

SEQ ID NO: 17504 - protein, 606 aa, Artificial Sequence
  Synthetic polypeptide
DQRGRRVISAFPTEHWLDGTKSIKKQVKIGSPYCLHLRVKFYSSEPNNLREELTRYLFVLQLKQDILSGKLDCPFDTAVQLAAYNLQAELGDYDLAEHSPELVSEFRFVPIQTEEMELAIFEKWKEYRGQTPAQAETNYLNKAKWLEMYGVDMHVVKARDGNDYSLGLTPTGVLVFEGDTKIGLFFWPKITRLDFKKNKLTLVVVEDDDQGKEQEHTFVFRLDHPKACKHLWKCAVEHHAFFRLRGPVQKSSHRSGFIRLGSRFRYSGKTEYQTTKTNKARRSTSFERRPSKRYSRRTLQMKACATKPEELSVHNNVSTQSNGSQQAWGMRSALPVSPSISSAPVPVEIENLPQSPGTDQHDRKCIPLNIDLLNSPDLLEATIGDVIGASDTMETSQALNDVNVATRLPGLGEPEVEYETLKDTSEKLKQLEMENSPLLSPRSNIDVNINSQEEVVKLTEKCLNNVIESPGLNVMRVPPDFKSNILKAQVEAVHKVTKEDSLLSHKNANVQDAATNSAVLNENNVPLPKESLETLMLITPADSGSVLKEATDELDALLASLTENLIDHTVAPQVSSTSMITPRWIVPLWSHFGRRSCPEAEVFTDH

SEQ ID NO: 17505 - protein, 652 aa, Artificial Sequence
  Synthetic polypeptide
DQRGRRVISAFPTEHWLDGTKSIKKQVKIGSPYCLHLRVKFYSSEPNNLREELTRYLFVLQLKQDILSGKLDCPFDTAVQLAAYNLQAELGDYDLAEHSPELVSEFRFVPIQTEEMELAIFEKWKEYRGQTPAQAETNYLNKAKWLEMYGVDMHVVKARDGNDYSLGLTPTGVLVFEGDTKIGLFFWPKITRLDFKKNKLTLVVVEDDDQGKEQEHTFVFRLDHPKACKHLWKCAVEHHAFFRLRGPVQKSSHRSGFIRLGSRFRYSGKTEYQTTKTNKARRSTSFERRPSKRYSRRTLQMKACATKPEELSVHNNVSTQSNGSQQAWGMRSALPVSPSISSAPVPVEIENLPQSPGTDQHDRKCIPLNIDLLNSPDLLEATIGDVIGASDTMETSQALNDVNVATRLPGLGEPEVEYETLKDTSEKLKQLEMENSPLLSPRSNIDVNINSQEEVVKLTEKCLNNVIESPGLNVMRVPPDFKSNILKAQVEAVHKVTKEDSLLSHKNANVQDAATNSAVLNENNVPLPKESLETLMLITPADSGSVLKEATDELDALLASLTENLIDHTVAPQVSSTSMITPRWIVPQSGAMSNGLAGCEMLLTGKEGHGNKDGISLISPPAPFLVDAVTSSGPILAEEAVLKQKCLLTTEL

SEQ ID NO: 17506 - protein, 651 aa, Artificial Sequence
  Synthetic polypeptide
DQRGRRVISAFPTEHWLDGTKSIKKQVKIGSPYCLHLRVKFYSSEPNNLREELTRYLFVLQLKQDILSGKLDCPFDTAVQLAAYNLQAELGDYDLAEHSPELVSEFRFVPIQTEEMELAIFEKWKEYRGQTPAQAETNYLNKAKWLEMYGVDMHVVKARDGNDYSLGLTPTGVLVFEGDTKIGLFFWPKITRLDFKKNKLTLVVVEDDDQGKEQEHTFVFRLDHPKACKHLWKCAVEHHAFFRLRGPVQKSSHRSGFIRLGSRFRYSGKTEYQTTKTNKARRSTSFERRPSKRYSRRTLQMKACATKPEELSVHNNVSTQSNGSQQAWGMRSALPVSPSISSAPVPVEIENLPQSPGTDQHDRKCIPLNIDLLNSPDLLEATIGDVIGASDTMETSQALNDVNVATRLPGLGEPEVEYETLKDTSEKLKQLEMENSPLLSPRSNIDVNINSQEEVVKLTEKCLNNVIESPGLNVMRVPPDFKSNILKAQVEAVHKVTKEDSLLSHKNANVQDAATNSAVLNENNVPLPKESLETLMLITPADSGSVLKEATDELDALLASLTENLIDHTVAPQVSSTSMITPRWIVPSGAMSNGLAGCEMLLTGKEGHGNKDGISLISPPAPFLVDAVTSSGPILAEEAVLKQKCLLTTEL

SEQ ID NO: 17507 - protein, 424 aa, Artificial Sequence
  Synthetic polypeptide
DQRGRRVISAFPTEHWLDGTKSIKKQVKIGSPYCLHLRVKFYSSEPNNLREELTRYLFVLQLKQDILSGKLDCPFDTAVQLAAYNLQAELGDYDLAEHSPELVSEFRFVPIQTEEMELAIFEKWKEYRGQTPAQAETNYLNKAKWLEMYGVDMHVVKARDGNDYSLGLTPTGVLVFEGDTKIGLFFWPKITRLDFKKNKLTLVVVEDDDQGKEQEHTFVFRLDHPKACKHLWKCAVEHHAFFRLRGPVQKSSHRSGFIRLGSRFRYSGKTEYQTTKTNKARRSTSFERRPSKRYSRRTLQMKACATKPEELSVHNNVSTQSNGSQQAWGMRSALPVSPSISSAPVPVEIENLPQSPGTDQHDRKWLSAASDCCQRGGNQWNTRALPPPQTAHRNYTDFVHEHNVKNAGIRHDVHFPGHTAMTEI

SEQ ID NO: 17508 - protein, 19 aa, Artificial Sequence
  Synthetic polypeptide
FLHFQLSIGWMVQKASKSK

SEQ ID NO: 17509 - protein, 9 aa, Artificial Sequence
  Synthetic polypeptide
GLPSPAELL

SEQ ID NO: 17510 - protein, 116 aa, Artificial Sequence
  Synthetic polypeptide
SDGFTSVWHFPCWHSFSLLLPCEVVPSAMIVSFLRPPQPCGTFVEDYEPTKADSYRKKVVLDGEEVQIDILDTAGQEDYAAIRDNYFRSGEGFLLVFSITEHESFTATAEFREQIL

SEQ ID NO: 17511 - protein, 153 aa, Artificial Sequence
  Synthetic polypeptide
SDGFTSVWHFPCWHSFSLLLPCEVVPSAMIVSFLRPPQPCGTFVEDYEPTKADSYRKKVVLDGEEVQIDILDTAGQEDYAAIRDNYFRSGEGFLLVFSITEHESFTATAEFREQILRVKAEEDKIPLLVVGNKSDLEERRQVPVEEARSKAEE

SEQ ID NO: 17512 - protein, 171 aa, Artificial Sequence
  Synthetic polypeptide
SDGFTSVWHFPCWHSFSLLLPCEVVPSAMIVSFLRPPQPCGTFVEDYEPTKADSYRKKVVLDGEEVQIDILDTAGQEDYAAIRDNYFRSGEGFLLVFSITEHESFTATAEFREQILRVKAEEDKIPLLVVGNKSDLEERRQVPVEEARSKAEEWGVQYVETSAKTRANVDK

SEQ ID NO: 17513 - protein, 210 aa, Artificial Sequence
  Synthetic polypeptide
SDGFTSVWHFPCWHSFSLLLPCEVVPSAMIVSFLRPPQPCGTFVEDYEPTKADSYRKKVVLDGEEVQIDILDTAGQEDYAAIRDNYFRSGEGFLLVFSITEHESFTATAEFREQILRVKAEEDKIPLLVVGNKSDLEERRQVPVEEARSKAEEWGVQYVETSAKTRANVDKVFFDLMREIRTKKMSENKDKNGKKSSKNKKSFKERCCLL

SEQ ID NO: 17514 - protein, 24 aa, Artificial Sequence
  Synthetic polypeptide
SGSFCHDCKFPEASPALRNFCRRL

SEQ ID NO: 17515 - protein, 43 aa, Artificial Sequence
  Synthetic polypeptide
EGQSRGQSNIRAVESALGLTALQCSPALGERGNTSAPQFSHLA

SEQ ID NO: 17516 - protein, 80 aa, Artificial Sequence
  Synthetic polypeptide
GAEQRPEQHPCCGVSPGFDCPPMFTSFGRERKYLSTSVFPSSLIRGWPLPPPQCILPPLQSLIQGCLDGRMAEWRPPPPP

SEQ ID NO: 17517 - protein, 56 aa, Artificial Sequence
  Synthetic polypeptide
GPHQMQLPNLDFPATRTSLIRGWPLPPPQCILPPLQSLIQGCLDGRMAEWRPPPPP

SEQ ID NO: 17518 - protein, 47 aa, Artificial Sequence
  Synthetic polypeptide
TLLLSISPCGLFANVRSPSAFCHEWEQYEALTRCSCPIWTSQPLELA

SEQ ID NO: 17519 - protein, 57 aa, Artificial Sequence
  Synthetic polypeptide
AYGEYSGLKEQETRQSEAICEPQLDPRPRHKGHLGGTQGYLNADRVVDGSPEAGEGR

SEQ ID NO: 17520 - protein, 470 aa, Artificial Sequence
  Synthetic polypeptide
MVLQKLGKADETKDEQFEQCVQNFNKQLTEGTRLQKDLRTYLASVKAMHEASKKLNECLQEVYEPDWPGRDEANKIAENNDLLWMDYHQKLVDQALLTMDTYLGQFPDIKSRIAKRGRKLVDYDSARHHYESLQTAKKKDEAKIAKAEEELIKAQKVFEEMNVDLQEELPSLWNSRVGFYVNTFQSIAGLEENFHKEMSKLNQNLNDVLVGLEKQHGSNTFTVKAQPRKKSKLFSRLRRKKNSDNAPAKGNKSPSPPDGSPAATPEIRVNHEPEPAGGATPGATLPKSPSQLRKGPPVPPPPKHTPSKEVKQEQILSLFEDTFVPEISVTTPSQPAEASEVAGGTQPAAGAQEPGETAASEAASSSLPAVVVETFPATVNGTVEGGSGAGRLDLPPGFMFKVQAQHDYTATDTDELQLKAGDVVLVIPFQNPEEQDEGWLMGVKESDWNQHKELEKCRGVFPENFTERVP

SEQ ID NO: 17521 - protein, 427 aa, Artificial Sequence
  Synthetic polypeptide
MVLQKLGKADETKDEQFEQCVQNFNKQLTEGTRLQKDLRTYLASVKAMHEASKKLNECLQEVYEPDWPGRDEANKIAENNDLLWMDYHQKLVDQALLTMDTYLGQFPDIKSRIAKRGRKLVDYDSARHHYESLQTAKKKDEAKIAKAEEELIKAQKVFEEMNVDLQEELPSLWNSRVGFYVNTFQSIAGLEENFHKEMSKLNQNLNDVLVGLEKQHGSNTFTVKAQPRKKSKLFSRLRRKKNSDNAPAKGNKSPSPPDGSPAATPEIRVNHEPEPAGGATPGATLPKSPSQPAEASEVAGGTQPAAGAQEPGETAASEAASSSLPAVVVETFPATVNGTVEGGSGAGRLDLPPGFMFKVQAQHDYTATDTDELQLKAGDVVLVIPFQNPEEQDEGWLMGVKESDWNQHKELEKCRGVFPENFTERVP

SEQ ID NO: 17522 - protein, 397 aa, Artificial Sequence
  Synthetic polypeptide
MVLQKLGKADETKDEQFEQCVQNFNKQLTEGTRLQKDLRTYLASVKAMHEASKKLNECLQEVYEPDWPGRDEANKIAENNDLLWMDYHQKLVDQALLTMDTYLGQFPDIKSRIAKRGRKLVDYDSARHHYESLQTAKKKDEAKIAKAEEELIKAQKVFEEMNVDLQEELPSLWNSRVGFYVNTFQSIAGLEENFHKEMSKLNQNLNDVLVGLEKQHGSNTFTVKAQPRKKSKLFSRLRRKKNSDNAPAKGNKSPSPPDGSPAATPEIRVNHEPEPAGGATPGATLPKSPSQSSLPAVVVETFPATVNGTVEGGSGAGRLDLPPGFMFKVQAQHDYTATDTDELQLKAGDVVLVIPFQNPEEQDEGWLMGVKESDWNQHKELEKCRGVFPENFTERVP

SEQ ID NO: 17523 - protein, 455 aa, Artificial Sequence
  Synthetic polypeptide
MVLQKLGKADETKDEQFEQCVQNFNKQLTEGTRLQKDLRTYLASVKAMHEASKKLNECLQEVYEPDWPGRDEANKIAENNDLLWMDYHQKLVDQALLTMDTYLGQFPDIKSRIAKRGRKLVDYDSARHHYESLQTAKKKDEAKIAKAEEELIKAQKVFEEMNVDLQEELPSLWNSRVGFYVNTFQSIAGLEENFHKEMSKLNQNLNDVLVGLEKQHGSNTFTVKAQPSDNAPAKGNKSPSPPDGSPAATPEIRVNHEPEPAGGATPGATLPKSPSQLRKGPPVPPPPKHTPSKEVKQEQILSLFEDTFVPEISVTTPSQPAEASEVAGGTQPAAGAQEPGETAASEAASSSLPAVVVETFPATVNGTVEGGSGAGRLDLPPGFMFKVQAQHDYTATDTDELQLKAGDVVLVIPFQNPEEQDEGWLMGVKESDWNQHKELEKCRGVFPENFTERVP

SEQ ID NO: 17524 - protein, 491 aa, Artificial Sequence
  Synthetic polypeptide
MVLQKLGKADETKDEQFEQCVQNFNKQLTEGTRLQKDLRTYLASVKAMHEASKKLNECLQEVYEPDWPGRDEANKIAENNDLLWMDYHQKLVDQALLTMDTYLGQFPDIKSRIAKRGRKLVDYDSARHHYESLQTAKKKDEAKIAKAEEELIKAQKVFEEMNVDLQEELPSLWNSRVGFYVNTFQSIAGLEENFHKEMSKLNQNLNDVLVGLEKQHGSNTFTVKAQPSDNAPAKGNKSPSPPDGSPAATPEIRVNHEPEPAGGATPGATLPKSPSQLRKGPPVPPPPKHTPSKEVKQEQILSLFEDTFVPEISVTTPSQPTESPAGSLPSGEPSAAEGTFAVSWPSQTAEPGPAQPAEASEVAGGTQPAAGAQEPGETAASEAASSSLPAVVVETFPATVNGTVEGGSGAGRLDLPPGFMFKVQAQHDYTATDTDELQLKAGDVVLVIPFQNPEEQDEGWLMGVKESDWNQHKELEKCRGVFPENFTERVP

SEQ ID NO: 17525 - protein, 412 aa, Artificial Sequence
  Synthetic polypeptide
MVLQKLGKADETKDEQFEQCVQNFNKQLTEGTRLQKDLRTYLASVKAMHEASKKLNECLQEVYEPDWPGRDEANKIAENNDLLWMDYHQKLVDQALLTMDTYLGQFPDIKSRIAKRGRKLVDYDSARHHYESLQTAKKKDEAKIAKAEEELIKAQKVFEEMNVDLQEELPSLWNSRVGFYVNTFQSIAGLEENFHKEMSKLNQNLNDVLVGLEKQHGSNTFTVKAQPSDNAPAKGNKSPSPPDGSPAATPEIRVNHEPEPAGGATPGATLPKSPSQPAEASEVAGGTQPAAGAQEPGETAASEAASSSLPAVVVETFPATVNGTVEGGSGAGRLDLPPGFMFKVQAQHDYTATDTDELQLKAGDVVLVIPFQNPEEQDEGWLMGVKESDWNQHKELEKCRGVFPENFTERVP

SEQ ID NO: 17526 - protein, 448 aa, Artificial Sequence
  Synthetic polypeptide
MVLQKLGKADETKDEQFEQCVQNFNKQLTEGTRLQKDLRTYLASVKAMHEASKKLNECLQEVYEPDWPGRDEANKIAENNDLLWMDYHQKLVDQALLTMDTYLGQFPDIKSRIAKRGRKLVDYDSARHHYESLQTAKKKDEAKIAKAEEELIKAQKVFEEMNVDLQEELPSLWNSRVGFYVNTFQSIAGLEENFHKEMSKLNQNLNDVLVGLEKQHGSNTFTVKAQPSDNAPAKGNKSPSPPDGSPAATPEIRVNHEPEPAGGATPGATLPKSPSQPTESPAGSLPSGEPSAAEGTFAVSWPSQTAEPGPAQPAEASEVAGGTQPAAGAQEPGETAASEAASSSLPAVVVETFPATVNGTVEGGSGAGRLDLPPGFMFKVQAQHDYTATDTDELQLKAGDVVLVIPFQNPEEQDEGWLMGVKESDWNQHKELEKCRGVFPENFTERVP

SEQ ID NO: 17527 - protein, 382 aa, Artificial Sequence
  Synthetic polypeptide
MVLQKLGKADETKDEQFEQCVQNFNKQLTEGTRLQKDLRTYLASVKAMHEASKKLNECLQEVYEPDWPGRDEANKIAENNDLLWMDYHQKLVDQALLTMDTYLGQFPDIKSRIAKRGRKLVDYDSARHHYESLQTAKKKDEAKIAKAEEELIKAQKVFEEMNVDLQEELPSLWNSRVGFYVNTFQSIAGLEENFHKEMSKLNQNLNDVLVGLEKQHGSNTFTVKAQPSDNAPAKGNKSPSPPDGSPAATPEIRVNHEPEPAGGATPGATLPKSPSQSSLPAVVVETFPATVNGTVEGGSGAGRLDLPPGFMFKVQAQHDYTATDTDELQLKAGDVVLVIPFQNPEEQDEGWLMGVKESDWNQHKELEKCRGVFPENFTERVP

SEQ ID NO: 17528 - protein, 523 aa, Artificial Sequence
  Synthetic polypeptide
MVLQKLGKADETKDEQFEQCVQNFNKQLTEGTRLQKDLRTYLASVKAMHEASKKLNECLQEVYEPDWPGRDEANKIAENNDLLWMDYHQKLVDQALLTMDTYLGQFPDIKSRIAKRGRKLVDYDSARHHYESLQTAKKKDEAKIAKPVSLLEKAAPQWCQGKLQAHLVAQTNLLRNQAEEELIKAQKVFEEMNVDLQEELPSLWNSRVGFYVNTFQSIAGLEENFHKEMSKLNQNLNDVLVGLEKQHGSNTFTVKAQPSDNAPAKGNKSPSPPDGSPAATPEIRVNHEPEPAGGATPGATLPKSPSQFEAPGPFSEQASLLDLDFDPLPPVTSPVKAPTPSGQSIPWDLWEPTESPAGSLPSGEPSAAEGTFAVSWPSQTAEPGPAQPAEASEVAGGTQPAAGAQEPGETAASEAASSSLPAVVVETFPATVNGTVEGGSGAGRLDLPPGFMFKVQAQHDYTATDTDELQLKAGDVVLVIPFQNPEEQDEGWLMGVKESDWNQHKELEKCRGVFPENFTERVP

SEQ ID NO: 17529 - protein, 566 aa, Artificial Sequence
  Synthetic polypeptide
MVLQKLGKADETKDEQFEQCVQNFNKQLTEGTRLQKDLRTYLASVKAMHEASKKLNECLQEVYEPDWPGRDEANKIAENNDLLWMDYHQKLVDQALLTMDTYLGQFPDIKSRIAKRGRKLVDYDSARHHYESLQTAKKKDEAKIAKPVSLLEKAAPQWCQGKLQAHLVAQTNLLRNQAEEELIKAQKVFEEMNVDLQEELPSLWNSRVGFYVNTFQSIAGLEENFHKEMSKLNQNLNDVLVGLEKQHGSNTFTVKAQPSDNAPAKGNKSPSPPDGSPAATPEIRVNHEPEPAGGATPGATLPKSPSQLRKGPPVPPPPKHTPSKEVKQEQILSLFEDTFVPEISVTTPSQFEAPGPFSEQASLLDLDFDPLPPVTSPVKAPTPSGQSIPWDLWEPTESPAGSLPSGEPSAAEGTFAVSWPSQTAEPGPAQPAEASEVAGGTQPAAGAQEPGETAASEAASSSLPAVVVETFPATVNGTVEGGSGAGRLDLPPGFMFKVQAQHDYTATDTDELQLKAGDVVLVIPFQNPEEQDEGWLMGVKESDWNQHKELEKCRGVFPENFTERVP

SEQ ID NO: 17530 - protein, 479 aa, Artificial Sequence
  Synthetic polypeptide
MVLQKLGKADETKDEQFEQCVQNFNKQLTEGTRLQKDLRTYLASVKAMHEASKKLNECLQEVYEPDWPGRDEANKIAENNDLLWMDYHQKLVDQALLTMDTYLGQFPDIKSRIAKRGRKLVDYDSARHHYESLQTAKKKDEAKIAKPVSLLEKAAPQWCQGKLQAHLVAQTNLLRNQAEEELIKAQKVFEEMNVDLQEELPSLWNSRVGFYVNTFQSIAGLEENFHKEMSKLNQNLNDVLVGLEKQHGSNTFTVKAQPSDNAPAKGNKSPSPPDGSPAATPEIRVNHEPEPAGGATPGATLPKSPSQPTESPAGSLPSGEPSAAEGTFAVSWPSQTAEPGPAQPAEASEVAGGTQPAAGAQEPGETAASEAASSSLPAVVVETFPATVNGTVEGGSGAGRLDLPPGFMFKVQAQHDYTATDTDELQLKAGDVVLVIPFQNPEEQDEGWLMGVKESDWNQHKELEKCRGVFPENFTERVP

SEQ ID NO: 17531 - protein, 44 aa, Artificial Sequence
  Synthetic polypeptide
RAFGGHPRIFECGPCGRWFSRSWGRQMRPRMSSLSSASRISTSS

SEQ ID NO: 17532 - protein, 45 aa, Artificial Sequence
  Synthetic polypeptide
AVWIQVWTPLCCQYVGRLGQRRVPALPGPLLPRRAHCQQQWGAVP

SEQ ID NO: 17533 - protein, 360 aa, Artificial Sequence
  Synthetic polypeptide
MVQRMEPWKTEQSGFKCGPRSAVNMSDALANAVCQRCQARFSPAERIVNSNGELYHEHCFVCAQCFRPFPEGLFYEFEGRKYCEHDFQMLFAPCCGSCGEFIIGRVIKAMNNNWHPGCFRCELCDVELADLGFVKNAGRHLCRPCHNREKAKGLGKYICQRCHLVIDEQPLMFRSDAYHPDHFNCTHCGKELTAEARELKGELYCLPCHDKMGVPICGACRRPIEGRVVNALGKQWHVEHFVCAKCEKPFLGHRHYEKKGLAYCETHYNQLFGDVCYNCSHVIEGDVVSALNKAWCVSCFSCSTCNSKLTLKNKFVEFDMKPVCKRCYEKFPLELKKRLKKLSELTSRKAQPKATDLNSA

SEQ ID NO: 17534 - protein, 109 aa, Artificial Sequence
  Synthetic polypeptide
WCRGWNHGRLSSLDSSVDPALLSICRTPWPTPCASAARPASPPPSALSTAMGSCTMSTASCVPSASGPSPRGSSMSLKAGSTANTTSKCCLLRAVDPAVSSSLAASSRP

SEQ ID NO: 17535 - protein, 36 aa, Artificial Sequence
  Synthetic polypeptide
ALEAEAAVSRDHDTTARVTESRSRLLRSMCWWCACC

SEQ ID NO: 17536 - protein, 221 aa, Artificial Sequence
  Synthetic polypeptide
DQPGQHGETPVSTNTKISLVWWCVRLCSQLPGRLRWEDPLSPGGRGCSEPRPRHYSAGDRESFTPTEEHVLVVRLLLKHLHAFANSLKPEQASPSAHSHATSPLEEFKRAAVPRFVQQKLYLFLQHCFGHWPLDASFRAVLEMWLSYLQPWRYAPDKQAPGSDSQPRAPFVQENLLMYTKLFVGFLNRALRTDLVSPKHALMVFRVAKVFAQPNLAEMIQK

SEQ ID NO: 17537 - protein, 570 aa, Artificial Sequence
  Synthetic polypeptide
DQPGQHGETPVSTNTKISLVWWCVRLCSQLPGRLRWEDPLSPGGRGCSEPRPRHYSAGDRESFTPTEEHVLVVRLLLKHLHAFANSLKPEQASPSAHSHATSPLEEFKRAAVPRFVQQKLYLFLQHCFGHWPLDASFRAVLEMWLSYLQPWRYAPDKQAPGSDSQPRCVSEKWAPFVQENLLMYTKLFVGFLNRALRTDLVSPKHALMVFRVAKVFAQPNLAEMIQKGEQLFLEPELVIPHRQHRLFTAPTFTGSFLSPWPPAVTDASFKVKSHVYSLEGQDCKYTPMFGPEARTLVLRLAQLITQAKHTAKSISDQCAESPAGHSFLSWLGFSSMDTNGSYTANDLDEMGQDSVRKTDEYLEKALEYLRQIFRLSEAQLRQFTLALGTTQDENGKKQLPDCIVGEDGLILTPLGRYQIINGLRRFEIEYQGDPELQPIRSYEIASLVRTLFRLSSAINHRFAGQMAALCSRDDFLGSFCRYHLTEPGLASRHLLSPVGRRQVAGHTRGPRLSLRFLGSYRTLVSLLLAFFVASLFCVGPLPCTLLLTLGYVLYASAMTLLTERGKLHQP

SEQ ID NO: 17538 - protein, 128 aa, Artificial Sequence
  Synthetic polypeptide
DQPGQHGETPVSTNTKISLVWWCVRLCSQLPGRLRWEDPLSPGGRGCSEPRPRHYSAGDRESFTPTEEHVLVVRLLLKHLHAFANSLKPEQASPSAHSHATSPLEEFKRIALATGPWTHRSELSWRCG

SEQ ID NO: 17539 - protein, 616 aa, Artificial Sequence
  Synthetic polypeptide
DQPGQHGETPVSTNTKISLVWWCVRLCSQLPGRLRWEDPLSPGGRGCSEPRPRHYSAGDRESFTPTEEHVLVVRLLLKHLHAFANSLKPEQASPSAHSHATSPLEEFKRMGLNLPEVPSALPRRSQPSLMGALGSSVSRASLLGKQQVTLPIPCRAAVPRFVQQKLYLFLQHCFGHWPLDASFRAVLEMWLSYLQPWRYAPDKQAPGSDSQPRCVSEKWAPFVQENLLMYTKLFVGFLNRALRTDLVSPKHALMVFRVAKVFAQPNLAEMIQKGEQLFLEPELVIPHRQHRLFTAPTFTGSFLSPWPPAVTDASFKVKSHVYSLEGQDCKYTPMFGPEARTLVLRLAQLITQAKHTAKSISDQCAESPAGHSFLSWLGFSSMDTNGSYTANDLDEMGQDSVRKTDEYLEKALEYLRQIFRLSEAQLRQFTLALGTTQDENGKKQLPDCIVGEDGLILTPLGRYQIINGLRRFEIEYQGDPELQPIRSYEIASLVRTLFRLSSAINHRFAGQMAALCSRDDFLGSFCRYHLTEPGLASRHLLSPVGRRQVAGHTRGPRLSLRFLGSYRTLVSLLLAFFVASLFCVGPLPCTLLLTLGYVLYASAMTLLTERGKLHQP

SEQ ID NO: 17540 - protein, 7 aa, Artificial Sequence
  Synthetic polypeptide
QRVVHAY

SEQ ID NO: 17541 - protein, 25 aa, Artificial Sequence
  Synthetic polypeptide
AETTTLQRGSRSRLLRSMCWWCACC

SEQ ID NO: 17542 - protein, 178 aa, Artificial Sequence
  Synthetic polypeptide
ALEAEAAVSRDHDTTARESFTPTEEHVLVVRLLLKHLHAFANSLKPEQASPSAHSHATSPLEEFKRAAVPRFVQQKLYLFLQHCFGHWPLDASFRAVLEMWLSYLQPWRYAPDKQAPGSDSQPRAPFVQENLLMYTKLFVGFLNRALRTDLVSPKHALMVFRVAKVFAQPNLAEMIQK

SEQ ID NO: 17543 - protein, 527 aa, Artificial Sequence
  Synthetic polypeptide
ALEAEAAVSRDHDTTARESFTPTEEHVLVVRLLLKHLHAFANSLKPEQASPSAHSHATSPLEEFKRAAVPRFVQQKLYLFLQHCFGHWPLDASFRAVLEMWLSYLQPWRYAPDKQAPGSDSQPRCVSEKWAPFVQENLLMYTKLFVGFLNRALRTDLVSPKHALMVFRVAKVFAQPNLAEMIQKGEQLFLEPELVIPHRQHRLFTAPTFTGSFLSPWPPAVTDASFKVKSHVYSLEGQDCKYTPMFGPEARTLVLRLAQLITQAKHTAKSISDQCAESPAGHSFLSWLGFSSMDTNGSYTANDLDEMGQDSVRKTDEYLEKALEYLRQIFRLSEAQLRQFTLALGTTQDENGKKQLPDCIVGEDGLILTPLGRYQIINGLRRFEIEYQGDPELQPIRSYEIASLVRTLFRLSSAINHRFAGQMAALCSRDDFLGSFCRYHLTEPGLASRHLLSPVGRRQVAGHTRGPRLSLRFLGSYRTLVSLLLAFFVASLFCVGPLPCTLLLTLGYVLYASAMTLLTERGKLHQP

SEQ ID NO: 17544 - protein, 85 aa, Artificial Sequence
  Synthetic polypeptide
ALEAEAAVSRDHDTTARESFTPTEEHVLVVRLLLKHLHAFANSLKPEQASPSAHSHATSPLEEFKRIALATGPWTHRSELSWRCG

SEQ ID NO: 17545 - protein, 573 aa, Artificial Sequence
  Synthetic polypeptide
ALEAEAAVSRDHDTTARESFTPTEEHVLVVRLLLKHLHAFANSLKPEQASPSAHSHATSPLEEFKRMGLNLPEVPSALPRRSQPSLMGALGSSVSRASLLGKQQVTLPIPCRAAVPRFVQQKLYLFLQHCFGHWPLDASFRAVLEMWLSYLQPWRYAPDKQAPGSDSQPRCVSEKWAPFVQENLLMYTKLFVGFLNRALRTDLVSPKHALMVFRVAKVFAQPNLAEMIQKGEQLFLEPELVIPHRQHRLFTAPTFTGSFLSPWPPAVTDASFKVKSHVYSLEGQDCKYTPMFGPEARTLVLRLAQLITQAKHTAKSISDQCAESPAGHSFLSWLGFSSMDTNGSYTANDLDEMGQDSVRKTDEYLEKALEYLRQIFRLSEAQLRQFTLALGTTQDENGKKQLPDCIVGEDGLILTPLGRYQIINGLRRFEIEYQGDPELQPIRSYEIASLVRTLFRLSSAINHRFAGQMAALCSRDDFLGSFCRYHLTEPGLASRHLLSPVGRRQVAGHTRGPRLSLRFLGSYRTLVSLLLAFFVASLFCVGPLPCTLLLTLGYVLYASAMTLLTERGKLHQP

SEQ ID NO: 17546 - protein, 63 aa, Artificial Sequence
  Synthetic polypeptide
DQPGQHGETPVSTNTKISLVWWCVRLCSQLPGRLRWEDPLSPGGRGCSEPRPRHYSAGVVHAY

SEQ ID NO: 17547 - protein, 218 aa, Artificial Sequence
  Synthetic polypeptide
GRRGLTPLILVRWEAQQERIAQGREFKTSLASIVFVEMWLHHYSLEMYQKMQSPHAKESFTPTEEHVLVVRLLLKHLHAFANSLKPEQASPSAHSHATSPLEEFKRAAVPRFVQQKLYLFLQHCFGHWPLDASFRAVLEMWLSYLQPWRYAPDKQAPGSDSQPRAPFVQENLLMYTKLFVGFLNRALRTDLVSPKHALMVFRVAKVFAQPNLAEMIQK

SEQ ID NO: 17548 - protein, 567 aa, Artificial Sequence
  Synthetic polypeptide
GRRGLTPLILVRWEAQQERIAQGREFKTSLASIVFVEMWLHHYSLEMYQKMQSPHAKESFTPTEEHVLVVRLLLKHLHAFANSLKPEQASPSAHSHATSPLEEFKRAAVPRFVQQKLYLFLQHCFGHWPLDASFRAVLEMWLSYLQPWRYAPDKQAPGSDSQPRCVSEKWAPFVQENLLMYTKLFVGFLNRALRTDLVSPKHALMVFRVAKVFAQPNLAEMIQKGEQLFLEPELVIPHRQHRLFTAPTFTGSFLSPWPPAVTDASFKVKSHVYSLEGQDCKYTPMFGPEARTLVLRLAQLITQAKHTAKSISDQCAESPAGHSFLSWLGFSSMDTNGSYTANDLDEMGQDSVRKTDEYLEKALEYLRQIFRLSEAQLRQFTLALGTTQDENGKKQLPDCIVGEDGLILTPLGRYQIINGLRRFEIEYQGDPELQPIRSYEIASLVRTLFRLSSAINHRFAGQMAALCSRDDFLGSFCRYHLTEPGLASRHLLSPVGRRQVAGHTRGPRLSLRFLGSYRTLVSLLLAFFVASLFCVGPLPCTLLLTLGYVLYASAMTLLTERGKLHQP

SEQ ID NO: 17549 - protein, 103 aa, Artificial Sequence
  Synthetic polypeptide
GRRGLTPLILVRWEAQQERIAQGREFKTSLASIVFVEMWLHHYSLEMYQKMQSPHAKGCCPEVRPAETLPLLAALLWPLAPGRIVQSCPGDVAELPAAVAVRA

SEQ ID NO: 17550 - protein, 596 aa, Artificial Sequence
  Synthetic polypeptide
GRRGLTPLILVRWEAQQERIAQGREFKTSLASIVFVEMWLHHYSLEMYQKMQSPHAKLEVLHYRLSVSSALYSPAQPSLQALHAYQESFTPTEEHVLVVRLLLKHLHAFANSLKPEQASPSAHSHATSPLEEFKRAAVPRFVQQKLYLFLQHCFGHWPLDASFRAVLEMWLSYLQPWRYAPDKQAPGSDSQPRCVSEKWAPFVQENLLMYTKLFVGFLNRALRTDLVSPKHALMVFRVAKVFAQPNLAEMIQKGEQLFLEPELVIPHRQHRLFTAPTFTGSFLSPWPPAVTDASFKVKSHVYSLEGQDCKYTPMFGPEARTLVLRLAQLITQAKHTAKSISDQCAESPAGHSFLSWLGFSSMDTNGSYTANDLDEMGQDSVRKTDEYLEKALEYLRQIFRLSEAQLRQFTLALGTTQDENGKKQLPDCIVGEDGLILTPLGRYQIINGLRRFEIEYQGDPELQPIRSYEIASLVRTLFRLSSAINHRFAGQMAALCSRDDFLGSFCRYHLTEPGLASRHLLSPVGRRQVAGHTRGPRLSLRFLGSYRTLVSLLLAFFVASLFCVGPLPCTLLLTLGYVLYASAMTLLTERGKLHQP

SEQ ID NO: 17551 - protein, 642 aa, Artificial Sequence
  Synthetic polypeptide
GRRGLTPLILVRWEAQQERIAQGREFKTSLASIVFVEMWLHHYSLEMYQKMQSPHAKLEVLHYRLSVSSALYSPAQPSLQALHAYQESFTPTEEHVLVVRLLLKHLHAFANSLKPEQASPSAHSHATSPLEEFKRMGLNLPEVPSALPRRSQPSLMGALGSSVSRASLLGKQQVTLPIPCRAAVPRFVQQKLYLFLQHCFGHWPLDASFRAVLEMWLSYLQPWRYAPDKQAPGSDSQPRCVSEKWAPFVQENLLMYTKLFVGFLNRALRTDLVSPKHALMVFRVAKVFAQPNLAEMIQKGEQLFLEPELVIPHRQHRLFTAPTFTGSFLSPWPPAVTDASFKVKSHVYSLEGQDCKYTPMFGPEARTLVLRLAQLITQAKHTAKSISDQCAESPAGHSFLSWLGFSSMDTNGSYTANDLDEMGQDSVRKTDEYLEKALEYLRQIFRLSEAQLRQFTLALGTTQDENGKKQLPDCIVGEDGLILTPLGRYQIINGLRRFEIEYQGDPELQPIRSYEIASLVRTLFRLSSAINHRFAGQMAALCSRDDFLGSFCRYHLTEPGLASRHLLSPVGRRQVAGHTRGPRLSLRFLGSYRTLVSLLLAFFVASLFCVGPLPCTLLLTLGYVLYASAMTLLTERGKLHQP

SEQ ID NO: 17552 - protein, 93 aa, Artificial Sequence
  Synthetic polypeptide
GRRGLTPLILVRWEAQQERIAQGREFKTSLASIVFVEMWLHHYSLEMYQKMQSPHAKLEVLHYRLSVSSALYSPAQPSLQALHAYQVPGQQRK

SEQ ID NO: 17553 - protein, 214 aa, Artificial Sequence
  Synthetic polypeptide
GRRGLTPLILVRWEAQQERIAQGREFKTSLASIVFVEMWLHHYSLEMYQKMQSPHAKVLEMWLSYLQPWRYAPDKQAPGSDSQPRCVSEKWAPFVQENLLMYTKLFVGFLNRALRTDLVSPKHALMVFRVAKVFAQPNLAEMIQKGEQLFLEPELVIPHRQHRLFTAPTFTGSFLSPWPPAVTDASFKVKSHVYSLEGQDCKYTPMFGPEARTL

SEQ ID NO: 17554 - protein, 36 aa, Artificial Sequence
  Synthetic polypeptide
RAQGPHTSNLSALGGPAGKDCSRPGVQDQPGQHSFC

SEQ ID NO: 17555 - protein, 827 aa, Artificial Sequence
  Synthetic polypeptide
PAVIVHLYPSGCCEWFAKKAIFNSPLEAAMAFPHLQQPSFLLASLKADSINKPFAQQCQDLVKVIEDFPAKELHTIFPWLVESIFGSLDGVLVGWNLRCLQGRVNPVEYSIVMEFLDPGGPMMKLVYKLQAEDYKFDFPVSYLPGPVKASIQECILPDSPLYHNKVQFTPTGGLGLNLALNPFEYYIFFFALSLITQKPLPVSLHVRTSDCAYFILVDRYLSWFLPTEGSVPPPLSSSPGGTSPSPPPRTPAIPFASYGLHHTSLLKRHISHQTSVNADPASHEIWRSETLLQVFVEMWLHHYSLEMYQKMQSPHAKESFTPTEEHVLVVRLLLKHLHAFANSLKPEQASPSAHSHATSPLEEFKRAAVPRFVQQKLYLFLQHCFGHWPLDASFRAVLEMWLSYLQPWRYAPDKQAPGSDSQPRCVSEKWAPFVQENLLMYTKLFVGFLNRALRTDLVSPKHALMVFRVAKVFAQPNLAEMIQKGEQLFLEPELVIPHRQHRLFTAPTFTGSFLSPWPPAVTDASFKVKSHVYSLEGQDCKYTPMFGPEARTLVLRLAQLITQAKHTAKSISDQCAESPAGHSFLSWLGFSSMDTNGSYTANDLDEMGQDSVRKTDEYLEKALEYLRQIFRLSEAQLRQFTLALGTTQDENGKKQLPDCIVGEDGLILTPLGRYQIINGLRRFEIEYQGDPELQPIRSYEIASLVRTLFRLSSAINHRFAGQMAALCSRDDFLGSFCRYHLTEPGLASRHLLSPVGRRQVAGHTRGPRLSLRFLGSYRTLVSLLLAFFVASLFCVGPLPCTLLLTLGYVLYASAMTLLTERGKLHQP

SEQ ID NO: 17556 - protein, 856 aa, Artificial Sequence
  Synthetic polypeptide
PAVIVHLYPSGCCEWFAKKAIFNSPLEAAMAFPHLQQPSFLLASLKADSINKPFAQQCQDLVKVIEDFPAKELHTIFPWLVESIFGSLDGVLVGWNLRCLQGRVNPVEYSIVMEFLDPGGPMMKLVYKLQAEDYKFDFPVSYLPGPVKASIQECILPDSPLYHNKVQFTPTGGLGLNLALNPFEYYIFFFALSLITQKPLPVSLHVRTSDCAYFILVDRYLSWFLPTEGSVPPPLSSSPGGTSPSPPPRTPAIPFASYGLHHTSLLKRHISHQTSVNADPASHEIWRSETLLQVFVEMWLHHYSLEMYQKMQSPHAKLEVLHYRLSVSSALYSPAQPSLQALHAYQESFTPTEEHVLVVRLLLKHLHAFANSLKPEQASPSAHSHATSPLEEFKRAAVPRFVQQKLYLFLQHCFGHWPLDASFRAVLEMWLSYLQPWRYAPDKQAPGSDSQPRCVSEKWAPFVQENLLMYTKLFVGFLNRALRTDLVSPKHALMVFRVAKVFAQPNLAEMIQKGEQLFLEPELVIPHRQHRLFTAPTFTGSFLSPWPPAVTDASFKVKSHVYSLEGQDCKYTPMFGPEARTLVLRLAQLITQAKHTAKSISDQCAESPAGHSFLSWLGFSSMDTNGSYTANDLDEMGQDSVRKTDEYLEKALEYLRQIFRLSEAQLRQFTLALGTTQDENGKKQLPDCIVGEDGLILTPLGRYQIINGLRRFEIEYQGDPELQPIRSYEIASLVRTLFRLSSAINHRFAGQMAALCSRDDFLGSFCRYHLTEPGLASRHLLSPVGRRQVAGHTRGPRLSLRFLGSYRTLVSLLLAFFVASLFCVGPLPCTLLLTLGYVLYASAMTLLTERGKLHQP

SEQ ID NO: 17557 - protein, 754 aa, Artificial Sequence
  Synthetic polypeptide
PAVIVHLYPSGCCEWFAKKAIFNSPLEAAMAFPHLQQPSFLLASLKADSINKPFAQQCQDLVKVIEDFPAKGPVKASIQECILPDSPLYHNKVQFTPTGGLGLNLALNPFEYYIFFFALSLITQKPLPVSLHVRTSDCAYFILVDRYLSWFLPTEGSVPPPLSSSPGGTSPSPPPRTPAIPFASYGLHHTSLLKRHISHQTSVNADPASHEIWRSETLLQVFVEMWLHHYSLEMYQKMQSPHAKESFTPTEEHVLVVRLLLKHLHAFANSLKPEQASPSAHSHATSPLEEFKRAAVPRFVQQKLYLFLQHCFGHWPLDASFRAVLEMWLSYLQPWRYAPDKQAPGSDSQPRCVSEKWAPFVQENLLMYTKLFVGFLNRALRTDLVSPKHALMVFRVAKVFAQPNLAEMIQKGEQLFLEPELVIPHRQHRLFTAPTFTGSFLSPWPPAVTDASFKVKSHVYSLEGQDCKYTPMFGPEARTLVLRLAQLITQAKHTAKSISDQCAESPAGHSFLSWLGFSSMDTNGSYTANDLDEMGQDSVRKTDEYLEKALEYLRQIFRLSEAQLRQFTLALGTTQDENGKKQLPDCIVGEDGLILTPLGRYQIINGLRRFEIEYQGDPELQPIRSYEIASLVRTLFRLSSAINHRFAGQMAALCSRDDFLGSFCRYHLTEPGLASRHLLSPVGRRQVAGHTRGPRLSLRFLGSYRTLVSLLLAFFVASLFCVGPLPCTLLLTLGYVLYASAMTLLTERGKLHQP

SEQ ID NO: 17558 - protein, 605 aa, Artificial Sequence
  Synthetic polypeptide
PAVIVHLYPSGCCEWFAKKAIFNSPLEAAMAFPHLQQPSFLLASLKADSINKPFAQQCQDLVKVIEDFPAKVFVEMWLHHYSLEMYQKMQSPHAKESFTPTEEHVLVVRLLLKHLHAFANSLKPEQASPSAHSHATSPLEEFKRAAVPRFVQQKLYLFLQHCFGHWPLDASFRAVLEMWLSYLQPWRYAPDKQAPGSDSQPRCVSEKWAPFVQENLLMYTKLFVGFLNRALRTDLVSPKHALMVFRVAKVFAQPNLAEMIQKGEQLFLEPELVIPHRQHRLFTAPTFTGSFLSPWPPAVTDASFKVKSHVYSLEGQDCKYTPMFGPEARTLVLRLAQLITQAKHTAKSISDQCAESPAGHSFLSWLGFSSMDTNGSYTANDLDEMGQDSVRKTDEYLEKALEYLRQIFRLSEAQLRQFTLALGTTQDENGKKQLPDCIVGEDGLILTPLGRYQIINGLRRFEIEYQGDPELQPIRSYEIASLVRTLFRLSSAINHRFAGQMAALCSRDDFLGSFCRYHLTEPGLASRHLLSPVGRRQVAGHTRGPRLSLRFLGSYRTLVSLLLAFFVASLFCVGPLPCTLLLTLGYVLYASAMTLLTERGKLHQP

SEQ ID NO: 17559 - protein, 3 aa, Artificial Sequence
  Synthetic polypeptide
VVC

SEQ ID NO: 17560 - protein, 40 aa, Artificial Sequence
  Synthetic polypeptide
YICTHRVVVSGLLRRPFSTLHWRLLWRSLTCSSPAFYWLA

SEQ ID NO: 17561 - protein, 52 aa, Artificial Sequence
  Synthetic polypeptide
PGMVTHVCNLCTLGGRGGLITSGLLRRPFSTLHWRLLWRSLTCSSPAFYWLA

SEQ ID NO: 17562 - protein, 826 aa, Artificial Sequence
  Synthetic polypeptide
SLHFGRPRRADHEWFAKKAIFNSPLEAAMAFPHLQQPSFLLASLKADSINKPFAQQCQDLVKVIEDFPAKELHTIFPWLVESIFGSLDGVLVGWNLRCLQGRVNPVEYSIVMEFLDPGGPMMKLVYKLQAEDYKFDFPVSYLPGPVKASIQECILPDSPLYHNKVQFTPTGGLGLNLALNPFEYYIFFFALSLITQKPLPVSLHVRTSDCAYFILVDRYLSWFLPTEGSVPPPLSSSPGGTSPSPPPRTPAIPFASYGLHHTSLLKRHISHQTSVNADPASHEIWRSETLLQVFVEMWLHHYSLEMYQKMQSPHAKESFTPTEEHVLVVRLLLKHLHAFANSLKPEQASPSAHSHATSPLEEFKRAAVPRFVQQKLYLFLQHCFGHWPLDASFRAVLEMWLSYLQPWRYAPDKQAPGSDSQPRCVSEKWAPFVQENLLMYTKLFVGFLNRALRTDLVSPKHALMVFRVAKVFAQPNLAEMIQKGEQLFLEPELVIPHRQHRLFTAPTFTGSFLSPWPPAVTDASFKVKSHVYSLEGQDCKYTPMFGPEARTLVLRLAQLITQAKHTAKSISDQCAESPAGHSFLSWLGFSSMDTNGSYTANDLDEMGQDSVRKTDEYLEKALEYLRQIFRLSEAQLRQFTLALGTTQDENGKKQLPDCIVGEDGLILTPLGRYQIINGLRRFEIEYQGDPELQPIRSYEIASLVRTLFRLSSAINHRFAGQMAALCSRDDFLGSFCRYHLTEPGLASRHLLSPVGRRQVAGHTRGPRLSLRFLGSYRTLVSLLLAFFVASLFCVGPLPCTLLLTLGYVLYASAMTLLTERGKLHQP

SEQ ID NO: 17563 - protein, 855 aa, Artificial Sequence
  Synthetic polypeptide
SLHFGRPRRADHEWFAKKAIFNSPLEAAMAFPHLQQPSFLLASLKADSINKPFAQQCQDLVKVIEDFPAKELHTIFPWLVESIFGSLDGVLVGWNLRCLQGRVNPVEYSIVMEFLDPGGPMMKLVYKLQAEDYKFDFPVSYLPGPVKASIQECILPDSPLYHNKVQFTPTGGLGLNLALNPFEYYIFFFALSLITQKPLPVSLHVRTSDCAYFILVDRYLSWFLPTEGSVPPPLSSSPGGTSPSPPPRTPAIPFASYGLHHTSLLKRHISHQTSVNADPASHEIWRSETLLQVFVEMWLHHYSLEMYQKMQSPHAKLEVLHYRLSVSSALYSPAQPSLQALHAYQESFTPTEEHVLVVRLLLKHLHAFANSLKPEQASPSAHSHATSPLEEFKRAAVPRFVQQKLYLFLQHCFGHWPLDASFRAVLEMWLSYLQPWRYAPDKQAPGSDSQPRCVSEKWAPFVQENLLMYTKLFVGFLNRALRTDLVSPKHALMVFRVAKVFAQPNLAEMIQKGEQLFLEPELVIPHRQHRLFTAPTFTGSFLSPWPPAVTDASFKVKSHVYSLEGQDCKYTPMFGPEARTLVLRLAQLITQAKHTAKSISDQCAESPAGHSFLSWLGFSSMDTNGSYTANDLDEMGQDSVRKTDEYLEKALEYLRQIFRLSEAQLRQFTLALGTTQDENGKKQLPDCIVGEDGLILTPLGRYQIINGLRRFEIEYQGDPELQPIRSYEIASLVRTLFRLSSAINHRFAGQMAALCSRDDFLGSFCRYHLTEPGLASRHLLSPVGRRQVAGHTRGPRLSLRFLGSYRTLVSLLLAFFVASLFCVGPLPCTLLLTLGYVLYASAMTLLTERGKLHQP

SEQ ID NO: 17564 - protein, 753 aa, Artificial Sequence
  Synthetic polypeptide
SLHFGRPRRADHEWFAKKAIFNSPLEAAMAFPHLQQPSFLLASLKADSINKPFAQQCQDLVKVIEDFPAKGPVKASIQECILPDSPLYHNKVQFTPTGGLGLNLALNPFEYYIFFFALSLITQKPLPVSLHVRTSDCAYFILVDRYLSWFLPTEGSVPPPLSSSPGGTSPSPPPRTPAIPFASYGLHHTSLLKRHISHQTSVNADPASHEIWRSETLLQVFVEMWLHHYSLEMYQKMQSPHAKESFTPTEEHVLVVRLLLKHLHAFANSLKPEQASPSAHSHATSPLEEFKRAAVPRFVQQKLYLFLQHCFGHWPLDASFRAVLEMWLSYLQPWRYAPDKQAPGSDSQPRCVSEKWAPFVQENLLMYTKLFVGFLNRALRTDLVSPKHALMVFRVAKVFAQPNLAEMIQKGEQLFLEPELVIPHRQHRLFTAPTFTGSFLSPWPPAVTDASFKVKSHVYSLEGQDCKYTPMFGPEARTLVLRLAQLITQAKHTAKSISDQCAESPAGHSFLSWLGFSSMDTNGSYTANDLDEMGQDSVRKTDEYLEKALEYLRQIFRLSEAQLRQFTLALGTTQDENGKKQLPDCIVGEDGLILTPLGRYQIINGLRRFEIEYQGDPELQPIRSYEIASLVRTLFRLSSAINHRFAGQMAALCSRDDFLGSFCRYHLTEPGLASRHLLSPVGRRQVAGHTRGPRLSLRFLGSYRTLVSLLLAFFVASLFCVGPLPCTLLLTLGYVLYASAMTLLTERGKLHQP

SEQ ID NO: 17565 - protein, 604 aa, Artificial Sequence
  Synthetic polypeptide
SLHFGRPRRADHEWFAKKAIFNSPLEAAMAFPHLQQPSFLLASLKADSINKPFAQQCQDLVKVIEDFPAKVFVEMWLHHYSLEMYQKMQSPHAKESFTPTEEHVLVVRLLLKHLHAFANSLKPEQASPSAHSHATSPLEEFKRAAVPRFVQQKLYLFLQHCFGHWPLDASFRAVLEMWLSYLQPWRYAPDKQAPGSDSQPRCVSEKWAPFVQENLLMYTKLFVGFLNRALRTDLVSPKHALMVFRVAKVFAQPNLAEMIQKGEQLFLEPELVIPHRQHRLFTAPTFTGSFLSPWPPAVTDASFKVKSHVYSLEGQDCKYTPMFGPEARTLVLRLAQLITQAKHTAKSISDQCAESPAGHSFLSWLGFSSMDTNGSYTANDLDEMGQDSVRKTDEYLEKALEYLRQIFRLSEAQLRQFTLALGTTQDENGKKQLPDCIVGEDGLILTPLGRYQIINGLRRFEIEYQGDPELQPIRSYEIASLVRTLFRLSSAINHRFAGQMAALCSRDDFLGSFCRYHLTEPGLASRHLLSPVGRRQVAGHTRGPRLSLRFLGSYRTLVSLLLAFFVASLFCVGPLPCTLLLTLGYVLYASAMTLLTERGKLHQP

SEQ ID NO: 17566 - protein, 5 aa, Artificial Sequence
  Synthetic polypeptide
SRVVC

SEQ ID NO: 17567 - protein, 53 aa, Artificial Sequence
  Synthetic polypeptide
DCIGRARLGGSTQPSARHTLGARGLLRRPFSTLHWRLLWRSLTCSSPAFYWLA

SEQ ID NO: 17568 - protein, 835 aa, Artificial Sequence
  Synthetic polypeptide
MHWSCSLRWQHPAQCQAYIGRSWFAKKAIFNSPLEAAMAFPHLQQPSFLLASLKADSINKPFAQQCQDLVKVIEDFPAKELHTIFPWLVESIFGSLDGVLVGWNLRCLQGRVNPVEYSIVMEFLDPGGPMMKLVYKLQAEDYKFDFPVSYLPGPVKASIQECILPDSPLYHNKVQFTPTGGLGLNLALNPFEYYIFFFALSLITQKPLPVSLHVRTSDCAYFILVDRYLSWFLPTEGSVPPPLSSSPGGTSPSPPPRTPAIPFASYGLHHTSLLKRHISHQTSVNADPASHEIWRSETLLQVFVEMWLHHYSLEMYQKMQSPHAKESFTPTEEHVLVVRLLLKHLHAFANSLKPEQASPSAHSHATSPLEEFKRAAVPRFVQQKLYLFLQHCFGHWPLDASFRAVLEMWLSYLQPWRYAPDKQAPGSDSQPRCVSEKWAPFVQENLLMYTKLFVGFLNRALRTDLVSPKHALMVFRVAKVFAQPNLAEMIQKGEQLFLEPELVIPHRQHRLFTAPTFTGSFLSPWPPAVTDASFKVKSHVYSLEGQDCKYTPMFGPEARTLVLRLAQLITQAKHTAKSISDQCAESPAGHSFLSWLGFSSMDTNGSYTANDLDEMGQDSVRKTDEYLEKALEYLRQIFRLSEAQLRQFTLALGTTQDENGKKQLPDCIVGEDGLILTPLGRYQIINGLRRFEIEYQGDPELQPIRSYEIASLVRTLFRLSSAINHRFAGQMAALCSRDDFLGSFCRYHLTEPGLASRHLLSPVGRRQVAGHTRGPRLSLRFLGSYRTLVSLLLAFFVASLFCVGPLPCTLLLTLGYVLYASAMTLLTERGKLHQP

SEQ ID NO: 17569 - protein, 864 aa, Artificial Sequence
  Synthetic polypeptide
MHWSCSLRWQHPAQCQAYIGRSWFAKKAIFNSPLEAAMAFPHLQQPSFLLASLKADSINKPFAQQCQDLVKVIEDFPAKELHTIFPWLVESIFGSLDGVLVGWNLRCLQGRVNPVEYSIVMEFLDPGGPMMKLVYKLQAEDYKFDFPVSYLPGPVKASIQECILPDSPLYHNKVQFTPTGGLGLNLALNPFEYYIFFFALSLITQKPLPVSLHVRTSDCAYFILVDRYLSWFLPTEGSVPPPLSSSPGGTSPSPPPRTPAIPFASYGLHHTSLLKRHISHQTSVNADPASHEIWRSETLLQVFVEMWLHHYSLEMYQKMQSPHAKLEVLHYRLSVSSALYSPAQPSLQALHAYQESFTPTEEHVLVVRLLLKHLHAFANSLKPEQASPSAHSHATSPLEEFKRAAVPRFVQQKLYLFLQHCFGHWPLDASFRAVLEMWLSYLQPWRYAPDKQAPGSDSQPRCVSEKWAPFVQENLLMYTKLFVGFLNRALRTDLVSPKHALMVFRVAKVFAQPNLAEMIQKGEQLFLEPELVIPHRQHRLFTAPTFTGSFLSPWPPAVTDASFKVKSHVYSLEGQDCKYTPMFGPEARTLVLRLAQLITQAKHTAKSISDQCAESPAGHSFLSWLGFSSMDTNGSYTANDLDEMGQDSVRKTDEYLEKALEYLRQIFRLSEAQLRQFTLALGTTQDENGKKQLPDCIVGEDGLILTPLGRYQIINGLRRFEIEYQGDPELQPIRSYEIASLVRTLFRLSSAINHRFAGQMAALCSRDDFLGSFCRYHLTEPGLASRHLLSPVGRRQVAGHTRGPRLSLRFLGSYRTLVSLLLAFFVASLFCVGPLPCTLLLTLGYVLYASAMTLLTERGKLHQP

SEQ ID NO: 17570 - protein, 762 aa, Artificial Sequence
  Synthetic polypeptide
MHWSCSLRWQHPAQCQAYIGRSWFAKKAIFNSPLEAAMAFPHLQQPSFLLASLKADSINKPFAQQCQDLVKVIEDFPAKGPVKASIQECILPDSPLYHNKVQFTPTGGLGLNLALNPFEYYIFFFALSLITQKPLPVSLHVRTSDCAYFILVDRYLSWFLPTEGSVPPPLSSSPGGTSPSPPPRTPAIPFASYGLHHTSLLKRHISHQTSVNADPASHEIWRSETLLQVFVEMWLHHYSLEMYQKMQSPHAKESFTPTEEHVLVVRLLLKHLHAFANSLKPEQASPSAHSHATSPLEEFKRAAVPRFVQQKLYLFLQHCFGHWPLDASFRAVLEMWLSYLQPWRYAPDKQAPGSDSQPRCVSEKWAPFVQENLLMYTKLFVGFLNRALRTDLVSPKHALMVFRVAKVFAQPNLAEMIQKGEQLFLEPELVIPHRQHRLFTAPTFTGSFLSPWPPAVTDASFKVKSHVYSLEGQDCKYTPMFGPEARTLVLRLAQLITQAKHTAKSISDQCAESPAGHSFLSWLGFSSMDTNGSYTANDLDEMGQDSVRKTDEYLEKALEYLRQIFRLSEAQLRQFTLALGTTQDENGKKQLPDCIVGEDGLILTPLGRYQIINGLRRFEIEYQGDPELQPIRSYEIASLVRTLFRLSSAINHRFAGQMAALCSRDDFLGSFCRYHLTEPGLASRHLLSPVGRRQVAGHTRGPRLSLRFLGSYRTLVSLLLAFFVASLFCVGPLPCTLLLTLGYVLYASAMTLLTERGKLHQP

SEQ ID NO: 17571 - protein, 613 aa, Artificial Sequence
  Synthetic polypeptide
MHWSCSLRWQHPAQCQAYIGRSWFAKKAIFNSPLEAAMAFPHLQQPSFLLASLKADSINKPFAQQCQDLVKVIEDFPAKVFVEMWLHHYSLEMYQKMQSPHAKESFTPTEEHVLVVRLLLKHLHAFANSLKPEQASPSAHSHATSPLEEFKRAAVPRFVQQKLYLFLQHCFGHWPLDASFRAVLEMWLSYLQPWRYAPDKQAPGSDSQPRCVSEKWAPFVQENLLMYTKLFVGFLNRALRTDLVSPKHALMVFRVAKVFAQPNLAEMIQKGEQLFLEPELVIPHRQHRLFTAPTFTGSFLSPWPPAVTDASFKVKSHVYSLEGQDCKYTPMFGPEARTLVLRLAQLITQAKHTAKSISDQCAESPAGHSFLSWLGFSSMDTNGSYTANDLDEMGQDSVRKTDEYLEKALEYLRQIFRLSEAQLRQFTLALGTTQDENGKKQLPDCIVGEDGLILTPLGRYQIINGLRRFEIEYQGDPELQPIRSYEIASLVRTLFRLSSAINHRFAGQMAALCSRDDFLGSFCRYHLTEPGLASRHLLSPVGRRQVAGHTRGPRLSLRFLGSYRTLVSLLLAFFVASLFCVGPLPCTLLLTLGYVLYASAMTLLTERGKLHQP

SEQ ID NO: 17572 - protein, 17 aa, Artificial Sequence
  Synthetic polypeptide
VAAPSPVPGIHWALVVC

SEQ ID NO: 17573 - protein, 26 aa, Artificial Sequence
  Synthetic polypeptide
FQNIHVQLARRDAVFHGGFRVGIYLF

SEQ ID NO: 17574 - protein, 53 aa, Artificial Sequence
  Synthetic polypeptide
VPEHTCAAGKERCCVSRWISRWDLPVLRVRPRMCSGDLNFPSLRDLQMMGKLE

SEQ ID NO: 17575 - protein, 180 aa, Artificial Sequence
  Synthetic polypeptide
ISLTRSDGFIKGSSPAHVCSSFAFHHDCEASPAMCNCYTPGTPYKVSCSPTSGAVPPYSSSPNPYQTAVYPVRSAYPQQSPYAQQGTYYTQPLYAAPPHVIHHTTVVQPNGMPATVYPAPIPPPRGNGVTMGMVAGTTMAMSAGTLLTAHSPTPVAPHPVTVPTYRAPGTPTYSYVPPQW

SEQ ID NO: 17576 - protein, 88 aa, Artificial Sequence
  Synthetic polypeptide
LLHSWHTLQSVLFPHQRGCATVLLLPEPLPDCRVPCAKCLPPAEPVCTARHVLHTAAVCSTSSRHPPHHGGAAQRHACNGVPCSHPPS

SEQ ID NO: 17577 - protein, 136 aa, Artificial Sequence
  Synthetic polypeptide
RAVPLHTFALPLPSTMIVRPPQPCVTVTLLAHLTKCPVPPPAGLCHRTPPPRTPTRLPCTLCEVPTPSRARMHSKARTTHSRCMQHLLTSSTTPRWCSPTACLQRCTLLPSPLLEATGSPWAWWLGPPWPCQQVPC

SEQ ID NO: 17578 - protein, 117 aa, Artificial Sequence; identical to SEQ ID NO: 3395
  Synthetic polypeptide

SEQ ID NO: 17579 - protein, 160 aa, Artificial Sequence; identical to SEQ ID NO: 3065
  Synthetic polypeptide

SEQ ID NO: 17580 - protein, 121 aa, Artificial Sequence; identical to SEQ ID NO: 3356
  Synthetic polypeptide

SEQ ID NO: 17581 - protein, 1445 aa, Artificial Sequence
  Synthetic polypeptide
EVPFASHHDSEDSPAMLNYKGIFVIQSESLKKCIQAGKSVLTLENCKQANKHMLWKWVSNHGLFNIGGSGCLGLNFSAPEQPLSLYECDSTLVSLRWRCNRKMITGPLQYSVQVAHDNTVVASRKYIHKWISYGSGGGDICEYLHKDLHTIKGNTHGMPCMFPFQYNHQWHHECTREGREDDLLWCATTSRYERDEKWGFCPDPTSAEVGCDTIWEKDLNSHICYQFNLLSSLSWSEAHSSCQMQGGTLLSITDETEENFIREHMSSKTVEVWMGLNQLDEHAGWQWSDGTPLNYLNWSPEVNFEPFVEDHCGTFSSFMPSAWRSRDCESTLPYICKKYLNHIDHEIVEKDAWKYYATHCEPGWNPYNRNCYKLQKEEKTWHEALRSCQADNSALIDITSLAEVEFLVTLLGDENASETWIGLSSNKIPVSFEWSNDSSVIFTNWHTLEPHIFPNRSQLCVSAEQSEGHWKVKNCEERLFYICKKAGHVLSDAESGCQEGWERHGGFCYKIDTVLRSFDQASSGYYCPPALVTITNRFEQAFITSLISSVVKMKDSYFWIALQDQNDTGEYTWKPVGQKPEPVQYTHWNTHQPRYSGGCVAMRGRHPLGRWEVKHCRHFKAMSLCKQPVENQEKAEYEERWPFHPCYLDWESEPGLASCFKVFHSEKVLMKRTWREAEAFCEEFGAHLASFAHIEEENFVNELLHSKFNWTEERQFWIGFNKRNPLNAGSWEWSDRTPVVSSFLDNTYFGEDARNCAVYKANKTLLPLHCGSKREWICKIPRDVKPKIPFWYQYDVPWLFYQDAEYLFHTFASEWLNFEFVCSWLHSDLLTIHSAHEQEFIHSKIKALSKYGASWWIGLQEERANDEFRWRDGTPVIYQNWDTGRERTVNNQSQRCGFISSITGLWGSEECSVSMPSICKRKKVWLIEKKKDTPKQHGTCPKGWLYFNYKCLLLNIPKDPSSWKNWTHAQHFCAEEGGTLVAIESEVEQAFITMNLFGQTTSVWIGLQNDDYETWLNGKPVVYSNWSPFDIINIPSHNTTEVQKHIPLCALLSSNPNFHFTGKWYFEDCGKEGYGFVCEKMQDTSGHGVNTSDMYPMPNTLEYGNRTYKIINANMTWYAAIKTCLMHKAQLVSITDQYHQSFLTVVLNRLGYAHWIGLFTTDNGLNFDWSDGTKSSFTFWKDEESSLLGDCVFADSNGRWHSTACESFLQGAICHVPPETRQSEHPELCSETSIPWIKFKSNCYSFSTVLDSMSFEAAHEFCKKEGSNLLTIKDEAENAFLLEELFAFGSSVQMVWLNAQFDGNNETIKWFDGTPTDQSNWGIRKPDTDYFKPHHCVALRIPEGLWQLSPCQEKKGFICKMEADIHTAEALPEKGPSHSIIPLAVVLTLIVIVAICTLSFCIYKHNGGFFRRLAGFRNPYYPATNFSTVYLEENILISDLEKSDQ

SEQ ID NO: 17582 - protein, 1306 aa, Artificial Sequence
  Synthetic polypeptide
EVPFASHHDSEDSPAMLNYKGIFVIQSESLKKCIQAGKSVLTLENCKQANKHMLWKWVSNHGLFNIGGSGCLGLNFSAPEQPLSLYECDSTLVSLRWRCNRKMITGPLQYSVQVAHDNTVVASRKYIHKWISYGSGGGDICEYLHKDLHTIKGNTHGMPCMFPFQYNHQWHHECTREGREDDLLWCATTSRYERDEKWGFCPDPTSAEVGCDTIWEKDLNSHICYQFNLLSSLSWSEAHSSCQMQGGTLLSITDETEENFIREHMSSKTVEVWMGLNQLDEHAGWQWSDGTPLNYLNWSPEVNFEPFVEDHCGTFSSFMPSAWRSRDCESTLPYICKKYLNHIDHEIVEKDAWKYYATHCEPGWNPYNRNCYKLQKEEKTWHEALRSCQADNSALIDITSLAEVEFLVTLLGDENASETWIGLSSNKIPVSFEWSNDSSVIFTNWHTLEPHIFPNRSQLCVSAEQSEGHWKVKNCEERLFYICKKAGHVLSDAESGCQEGWERHGGFCYKIDTVLRSFDQASSGYYCPPALVTITNRFEQAFITSLISSVVKMKDSYFWIALQDQNDTGEYTWKPVGQKPEPVQYTHWNTHQPRYSGGCVAMRGRHPLGRWEVKHCRHFKAMSLCKQPVENQEKAEYEERWPFHPCYLDWESEPGLASCFKVFHSEKVLMKRTWREAEAFCEEFGAHLASFAHIEEENFVNELLHSKFNWTEERQFWIGFNKRNPLNAGSWEWSDRTPVVSSFLDNTYFGEDARNCAVYKANKTLLPLHCGSKREWICKIPRDVKPKIPFWYQYDVPWLFYQDAEYLFHTFASEWLNFEFVCSWLHSDLLTIHSAHEQEFIHSKIKALSKYGASWWIGLQEERANDEFRWRDGTPVIYQNWDTGRERTVNNQSQRCGFISSITGLWGSEECSVSMPSICKRKKVWLIEKKKDTPKQHGTCPKGWLYFNYKCLLLNIPKDPSSWKNWTHAQHFCAEEGGTLVAIESEVEQAFITMNLFGQTTSVWIGLQNDDYETWLNGKPVVYSNWSPFDIINIPSHNTTEVQKHIPLCALLSSNPNFHFTGKWYFEDCGKEGYGFVCEKMQDTSGHGVNTSDMYPMPNTLEYGNRTYKIINANMTWYAAIKTCLMHKAQLVSITDQYHQSFLTVVLNRLGYAHWIGLFTTDNGLNFDWSDGTKSSFTFWKDEESSLLGDCVFADSNGRWHSTACESFLQGAICHVPPETRQSEHPELCSETSIPWIKFKSNCYSFSTVLDSMSFEAAHEFCKKEGSNLLTIKDEAENAFLLEELFAFGSSVQMVWLNAQFDGNSK

SEQ ID NO: 17583 - protein, 8 aa, Artificial Sequence
  Synthetic polypeptide
GLPSHVEL

SEQ ID NO: 17584 - protein, 23 aa, Artificial Sequence
  Synthetic polypeptide
TIKEYLLSKVRVSRNAFKQVNRF

SEQ ID NO: 17585 - protein, 19 aa, Artificial Sequence
  Synthetic polypeptide
KNCNTNKAETHPWLTMLQV

SEQ ID NO: 17586 - protein, 511 aa, Artificial Sequence
  Synthetic polypeptide
LSAYPILPGCRTRTWDSRSGGTERTVTQTRLKHTPGSPCCRCNCVEPHNPSNGTLKEWRESNISASDIIWENLTVSECKSLHGEYVGRACGHDHPYVPDVLFWSVILFFSTVTLSATLKQFKTSRYFPTKVRSIVSDFAVFLTILCMVLIDYAIGIPSPKLQVPSVFKPTRDDRGWFVTPLGPNPWWTVIAAIIPALLCTILIFMDQQITAVIINRKEHKLKKGCGYHLDLLMVAVMLGVCSIMGLPWFVAATVLSITHVNSLKLESECSAPGEQPKFLGIREQRVTGLMIFILMGSSVFMTSILKFIPMPVLYGVFLYMGASSLKGIQFFDRIKLFWMPAKHQPDFIYLRHVPLRKVHLFTIIQMSCLGLLWIIKVSRAAIVFPMMVLALVFVRKLMDLLFTKRELSWLDDLMPESKKKKLEDAEKEEEQSMLAMEDEGTVQLPLEGHYRDDPSVINISDEMSKTALWRNLLITADNSKDKESSFPSKSIESRKEKKADSGKGVDRETCL

SEQ ID NO: 17587 - protein, 493 aa, Artificial Sequence
  Synthetic polypeptide
LSAYPILPGCRTRTWDSRSGGTERTVTQTRLKHTPGSPCCRCNCVEPHNPSNGTLKEWRESNISASDIIWENLTVSECKSLHGEYVGRACGHDHPYVPDVLFWSVILFFSTVTLSATLKQFKTSRYFPTKVRSIVSDFAVFLTILCMVLIDYAIGIPSPKLQVPSVFKPTRDDRGWFVTPLGPNPWWTVIAAIIPALLCTILIFMDQQITAVIINRKEHKLKKGCGYHLDLLMVAVMLGVCSIMGLPWFVAATVLSITHVNSLKLESECSAPGEQPKFLGIREQRVTGLMIFILMGSSVFMTSILKFIPMPVLYGVFLYMGASSLKGIQFFDRIKLFWMPAKHQPDFIYLRHVPLRKVHLFTIIQMSCLGLLWIIKVSRAAIVFPMMVLALVFVRKLMDLLFTKRELSWLDDLMPESKKKKLEDAEKEEEQSMLAMEDEGTVQLPLEGHYRDDPSVINISDEMSKTALWRNLLITADNSKDKESSFPSKSSPS

SEQ ID NO: 17588 - protein, 429 aa, Artificial Sequence
  Synthetic polypeptide
LSAYPILPGCRTRTWDSRSGGTERTVTQTRLKHTPGSPCCRCNCVEPHNPSNGTLKEWRESNISASDIIWENLTVSECKSLHGEYVGRACGHDHPYVPDVLFWSVILFFSTVTLSATLKQFKTSRYFPTKVRSIVSDFAVFLTILCMVLIDYAIGIPSPKLQVPSVFKPTRDDRGWFVTPLGPNPWWTVIAAIIPALLCTILIFMDQQITAVIINRKEHKLKKGCGYHLDLLMVAVMLGVCSIMGLPWFVAATVLSITHVNSLKLESECSAPGEQPKFLGIREQRVTGLMIFILMGSSVFMTSILKFIPMPVLYGVFLYMGASSLKGIQFFDRIKLFWMPAKHQPDFIYLRHVPLRKVHLFTIIQMSCLGLLWIIKVSRAAIVFPMMVLALVFVRKLMDLLFTKRELSWLDDLMPESKKKKLEDAEKEH

SEQ ID NO: 17589 - protein, 23 aa, Artificial Sequence
  Synthetic polypeptide
NTPLAHHVAGVTVWNRIIPAMAH

SEQ ID NO: 17590 - protein, 141 aa, Artificial Sequence
  Synthetic polypeptide
LTPKSYGGYVSSLALASGTGLFKCGIAVAPVSSWEYYASVYTERFMGLPTKDDNLEHYKNSTVMARAEYFRNVDYLLIHGTADDNVHFQNSAQIAKALVNAQVDFQAMWYSDQNHGLSGLSTNHLYTHMTHFLKQCFSLSD

SEQ ID NO: 17591 - protein, 63 aa, Artificial Sequence
  Synthetic polypeptide
MMMTSRSLAPAHTSLLCSMFQMPADHLSHMSHMDLKLNLRLSPMEDTFHHWPLHLELVFSNVV

SEQ ID NO: 17592 - protein, 48 aa, Artificial Sequence
  Synthetic polypeptide
VLWRIRFITGPCIWNWSFQMWYSSGSSLQLGILRVCLHREIHGSPNKG

SEQ ID NO: 17593 - protein, 54 aa, Artificial Sequence
  Synthetic polypeptide
GLPSHEELNRGICSFSANLAIVIFMCHWQAKKNMEHRLTMDSALSLTKREGPET

SEQ ID NO: 17594 - protein, 190 aa, Artificial Sequence
  Synthetic polypeptide
RTEPRHLQFFSEFGNSDIYVSLAGKKKHGAPTNYGFCFKPNKAGGPRDLKMLCAEEEQSRTCWVTAIRLLKYGMQLYQNYMHPYQGRSGCSSQSISPMRSISENSLVAMDFSGQKSRVIENPTEALSVAVEEGLAWRKKGCLRLGTHGSPTASSQSSATNMAIHRSQPWFHHKISRDEAQRLIIQQGLVD

SEQ ID NO: 17595 - protein, 270 aa, Artificial Sequence
  Synthetic polypeptide
RTEPRHLQFFSEFGNSDIYVSLAGKKKHGAPTNYGFCFKPNKAGGPRDLKMLCAEEEQSRTCWVTAIRLLKYGMQLYQNYMHPYQGRSGCSSQSISPMRSISENSLVAMDFSGQKSRVIENPTEALSVAVEEGLAWRKKGCLRLGTHGSPTASSQSSATNMAIHRSQPWFHHKISRDEAQRLIIQQGLVDGVFLVRDSQSNPKTFVLSMSHGQKIKHFQIIPVEDDGEMFHTLDDGHTRFTDLIQLVEFYQLNKGVLPCKLKHYCARIAL

SEQ ID NO: 17596 - protein, 20 aa, Artificial Sequence
  Synthetic polypeptide
IDIKMANRYMKRWSTSPIIR

SEQ ID NO: 17597 - protein, 11 aa, Artificial Sequence
  Synthetic polypeptide
KGGQHHQSSGD

SEQ ID NO: 17598 - protein, 118 aa, Artificial Sequence
  Synthetic polypeptide
QVYEKVVNITNHQVIKVYSEDETSRALDVPSDITARDVCQLLILKNHYIDDHSWTLFEHLPHIGVERTIEDHELVIEVLSNWGIEEENKLYFRKNYAKYEFFKNPMYFFPEHMVSFAT

SEQ ID NO: 17599 - protein, 365 aa, Artificial Sequence
  Synthetic polypeptide
QVYEKVVNITNHQVIKVYSEDETSRALDVPSDITARDVCQLLILKNHYIDDHSWTLFEHLPHIGVERTIEDHELVIEVLSNWGIEEENKLYFRKNYAKYEFFKNPMYFFPEHMVSFATETNGEISPTQILQMFLSSSTYPEIHGFLHAKEQGKKSWKKIYFFLRRSGLYFSTKGTSKEPRHLQFFSEFGNSDIYVSLAGKKKHGAPTNYGFCFKPNKAGGPRDLKMLCAEEEQSRTCWVTAIRLLKYGMQLYQNYMHPYQGRSGCSSQSISPMRSISENSLVAMDFSGQKSRVIENPTEALSVAVEEGLAWRKKGCLRLGTHGSPTASSQSSATNMAIHRSQPWFHHKISRDEAQRLIIQQGLVD

SEQ ID NO: 17600 - protein, 445 aa, Artificial Sequence
  Synthetic polypeptide
QVYEKVVNITNHQVIKVYSEDETSRALDVPSDITARDVCQLLILKNHYIDDHSWTLFEHLPHIGVERTIEDHELVIEVLSNWGIEEENKLYFRKNYAKYEFFKNPMYFFPEHMVSFATETNGEISPTQILQMFLSSSTYPEIHGFLHAKEQGKKSWKKIYFFLRRSGLYFSTKGTSKEPRHLQFFSEFGNSDIYVSLAGKKKHGAPTNYGFCFKPNKAGGPRDLKMLCAEEEQSRTCWVTAIRLLKYGMQLYQNYMHPYQGRSGCSSQSISPMRSISENSLVAMDFSGQKSRVIENPTEALSVAVEEGLAWRKKGCLRLGTHGSPTASSQSSATNMAIHRSQPWFHHKISRDEAQRLIIQQGLVDGVFLVRDSQSNPKTFVLSMSHGQKIKHFQIIPVEDDGEMFHTLDDGHTRFTDLIQLVEFYQLNKGVLPCKLKHYCARIAL

SEQ ID NO: 17601 - protein, 496 aa, Artificial Sequence
  Synthetic polypeptide
ESRATEAVRDFRESLAAIEQRIAEEKAKRPKQERKDEDDENGPKPNSDLEAGKSLPFIYGDIPPEMVSVPLEDLDPYYINKKTFIVLNKGKAISRFSATPALYILTPFNPIRKLAIKILVHSLFNMLIMCTILTNCVFMTMSNPPDWTKNVEYTFTGIYTFESLIKILARGFCLEDFTFLRDPWNWLDFTVITFAYVTEFVDLGNVSALRTFRVLRALKTISVIPGLKTIVGALIQSVKKLSDVMILTVFCLSVFALIGLQLFMGNLRNKCLQWPPDNSSFEINITSFFNNSLDGNGTTFNRTVSIFNWDEYIEDKSHFYFLEGQNDALLCGNSSDAGQCPEGYICVKAGRNPNYGYTSFDTFSWAFLSLFRLMTQDFWENLYQLTLRAAGKTYMIFFVLVIFLGSFYLINLILAVVAMAYEEQNQATLEEAEQKEAEFQQMLEQLKKQQEEAQAAAAAASAESRDFSGAGGIGVFSESSSVASKLSSKSEKELKN

SEQ ID NO: 17602 - protein, 1998 aa, Artificial Sequence
  Synthetic polypeptide
ESRATEAVRDFRESLAAIEQRIAEEKAKRPKQERKDEDDENGPKPNSDLEAGKSLPFIYGDIPPEMVSVPLEDLDPYYINKKTFIVLNKGKAISRFSATPALYILTPFNPIRKLAIKILVHSLFNMLIMCTILTNCVFMTMSNPPDWTKNVEYTFTGIYTFESLIKILARGFCLEDFTFLRDPWNWLDFTVITFAYVTEFVDLGNVSALRTFRVLRALKTISVIPGLKTIVGALIQSVKKLSDVMILTVFCLSVFALIGLQLFMGNLRNKCLQWPPDNSSFEINITSFFNNSLDGNGTTFNRTVSIFNWDEYIEDKSHFYFLEGQNDALLCGNSSDAGQCPEGYICVKAGRNPNYGYTSFDTFSWAFLSLFRLMTQDFWENLYQLTLRAAGKTYMIFFVLVIFLGSFYLINLILAVVAMAYEEQNQATLEEAEQKEAEFQQMLEQLKKQQEEAQAAAAAASAESRDFSGAGGIGVFSESSSVASKLSSKSEKELKNRRKKKKQKEQSGEEEKNDRVRKSESEDSIRRKGFRFSLEGSRLTYEKRFSSPHQSLLSIRGSLFSPRRNSRASLFSFRGRAKDIGSENDFADDEHSTFEDNDSRRDSLFVPHRHGERRHSNVSQASRASRVLPILPMNGKMHSAVDCNGVVSLVGGPSTLTSAGQLLPEGTTTETEIRKRRSSSYHVSMDLLEDPTSRQRAMSIASILTNTMEELEESRQKCPPCWYKFANMCLIWDCCKPWLKVKHLVNLVVMDPFVDLAITICIVLNTLFMAMEHYPMTEQFSSVLSVGNLVFTGIFTAEMFLKIIAMDPYYYFQEGWNIFDGFIVSLSLMELGLANVEGLSVLRSFRLLRVFKLAKSWPTLNMLIKIIGNSVGALGNLTLVLAIIVFIFAVVGMQLFGKSYKECVCKISNDCELPRWHMHDFFHSFLIVFRVLCGEWIETMWDCMEVAGQTMCLTVFMMVMVIGNLVVLNLFLALLLSSFSSDNLAATDDDNEMNNLQIAVGRMQKGIDFVKRKIREFIQKAFVRKQKALDEIKPLEDLNNKKDSCISNHTTIEIGKDLNYLKDGNGTTSGIGSSVEKYVVDESDYMSFINNPSLTVTVPIAVGESDFENLNTEEFSSESDMEESKEKLNATSSSEGSTVDIGAPAEGEQPEVEPEESLEPEACFTEDCVRKFKCCQISIEEGKGKLWWNLRKTCYKIVEHNWFETFIVFMILLSSGALAFEDIYIEQRKTIKTMLEYADKVFTYIFILEMLLKWVAYGFQVYFTNAWCWLDFLIVDVSLVSLTANALGYSELGAIKSLRTLRALRPLRALSRFEGMRVVVNALLGAIPSIMNVLLVCLIFWLIFSIMGVNLFAGKFYHCINYTTGEMFDVSVVNNYSECKALIESNQTARWKNVKVNFDNVGLGYLSLLQVATFKGWMDIMYAAVDSRNVELQPKYEDNLYMYLYFVIFIIFGSFFTLNLFIGVIIDNFNQQKKKFGGQDIFMTEEQKKYYNAMKKLGSKKPQKPIPRPANKFQGMVFDFVTKQVFDISIMILICLNMVTMMVETDDQSQEMTNILYWINLVFIVLFTGECVLKLISLRYYYFTIGWNIFDFVVVILSIVGMFLAELIEKYFVSPTLFRVIRLARIGRILRLIKGAKGIRTLLFALMMSLPALFNIGLLLFLVMFIYAIFGMSNFAYVKREVGIDDMFNFETFGNSMICLFQITTSAGWDGLLAPILNSGPPDCDPDKDHPGSSVKGDCGNPSVGIFFFVSYIIISFLVVVNMYIAVILENFSVATEESAEPLSEDDFEMFYEVWEKFDPDATQFIEFAKLSDFADALDPPLLIAKPNKVQLIAMDLPMVSGDRIHCLDILFAFTKRVLGESGEMDALRIQMEERFMASNPSKVSYEPITTTLKRKQEEVSAIIIQRAYRRYLLKQKVKKVSSIYKKDKGKECDGTPIKEDTLIDKLNENSTPEKTDMTPSTTSPPSYDSVTKPEKEKFEKDKSEKEDKGKDIRESKK

SEQ ID NO: 17603 - protein, 1998 aa, Artificial Sequence
  Synthetic polypeptide
ESRATEAVRDFRESLAAIEQRIAEEKAKRPKQERKDEDDENGPKPNSDLEAGKSLPFIYGDIPPEMVSVPLEDLDPYYINKKTFIVLNKGKAISRFSATPALYILTPFNPIRKLAIKILVHSLFNMLIMCTILTNCVFMTMSNPPDWTKNVEYTFTGIYTFESLIKILARGFCLEDFTFLRDPWNWLDFTVITFAYVTEFVNLGNVSALRTFRVLRALKTISVIPGLKTIVGALIQSVKKLSDVMILTVFCLSVFALIGLQLFMGNLRNKCLQWPPDNSSFEINITSFFNNSLDGNGTTFNRTVSIFNWDEYIEDKSHFYFLEGQNDALLCGNSSDAGQCPEGYICVKAGRNPNYGYTSFDTFSWAFLSLFRLMTQDFWENLYQLTLRAAGKTYMIFFVLVIFLGSFYLINLILAVVAMAYEEQNQATLEEAEQKEAEFQQMLEQLKKQQEEAQAAAAAASAESRDFSGAGGIGVFSESSSVASKLSSKSEKELKNRRKKKKQKEQSGEEEKNDRVRKSESEDSIRRKGFRFSLEGSRLTYEKRFSSPHQSLLSIRGSLFSPRRNSRASLFSFRGRAKDIGSENDFADDEHSTFEDNDSRRDSLFVPHRHGERRHSNVSQASRASRVLPILPMNGKMHSAVDCNGVVSLVGGPSTLTSAGQLLPEGTTTETEIRKRRSSSYHVSMDLLEDPTSRQRAMSIASILTNTMEELEESRQKCPPCWYKFANMCLIWDCCKPWLKVKHLVNLVVMDPFVDLAITICIVLNTLFMAMEHYPMTEQFSSVLSVGNLVFTGIFTAEMFLKIIAMDPYYYFQEGWNIFDGFIVSLSLMELGLANVEGLSVLRSFRLLRVFKLAKSWPTLNMLIKIIGNSVGALGNLTLVLAIIVFIFAVVGMQLFGKSYKECVCKISNDCELPRWHMHDFFHSFLIVFRVLCGEWIETMWDCMEVAGQTMCLTVFMMVMVIGNLVVLNLFLALLLSSFSSDNLAATDDDNEMNNLQIAVGRMQKGIDFVKRKIREFIQKAFVRKQKALDEIKPLEDLNNKKDSCISNHTTIEIGKDLNYLKDGNGTTSGIGSSVEKYVVDESDYMSFINNPSLTVTVPIAVGESDFENLNTEEFSSESDMEESKEKLNATSSSEGSTVDIGAPAEGEQPEVEPEESLEPEACFTEDCVRKFKCCQISIEEGKGKLWWNLRKTCYKIVEHNWFETFIVFMILLSSGALAFEDIYIEQRKTIKTMLEYADKVFTYIFILEMLLKWVAYGFQVYFTNAWCWLDFLIVDVSLVSLTANALGYSELGAIKSLRTLRALRPLRALSRFEGMRVVVNALLGAIPSIMNVLLVCLIFWLIFSIMGVNLFAGKFYHCINYTTGEMFDVSVVNNYSECKALIESNQTARWKNVKVNFDNVGLGYLSLLQVATFKGWMDIMYAAVDSRNVELQPKYEDNLYMYLYFVIFIIFGSFFTLNLFIGVIIDNFNQQKKKFGGQDIFMTEEQKKYYNAMKKLGSKKPQKPIPRPANKFQGMVFDFVTKQVFDISIMILICLNMVTMMVETDDQSQEMTNILYWINLVFIVLFTGECVLKLISLRYYYFTIGWNIFDFVVVILSIVGMFLAELIEKYFVSPTLFRVIRLARIGRILRLIKGAKGIRTLLFALMMSLPALFNIGLLLFLVMFIYAIFGMSNFAYVKREVGIDDMFNFETFGNSMICLFQITTSAGWDGLLAPILNSGPPDCDPDKDHPGSSVKGDCGNPSVGIFFFVSYIIISFLVVVNMYIAVILENFSVATEESAEPLSEDDFEMFYEVWEKFDPDATQFIEFAKLSDFADALDPPLLIAKPNKVQLIAMDLPMVSGDRIHCLDILFAFTKRVLGESGEMDALRIQMEERFMASNPSKVSYEPITTTLKRKQEEVSAIIIQRAYRRYLLKQKVKKVSSIYKKDKGKECDGTPIKEDTLIDKLNENSTPEKTDMTPSTTSPPSYDSVTKPEKEKFEKDKSEKEDKGKDIRESKK

SEQ ID NO: 17604 - protein, 105 aa, Artificial Sequence
  Synthetic polypeptide
SATPHPPEWLQLKKAYHTVCENLELQKLSETSGNPLLLLNNALQKRKLRDPNRNARMRMMKMAQSQTVTWKQENLFHLFMETFLQRWCQCPWRIWTPTISIRKRL

SEQ ID NO: 17605 - protein, 15 aa, Artificial Sequence
  Synthetic polypeptide
SYRSCQRLQGIPCCY

SEQ ID NO: 17606 - protein, 21 aa, Artificial Sequence
  Synthetic polypeptide
GQEFKTSQANMTVYGSSSVVR

SEQ ID NO: 17607 - protein, 856 aa, Artificial Sequence
  Synthetic polypeptide
SQHFGRPRQADHLRSGVQDQPGKHDCVRKFKCCQISIEEGKGKLWWNLRKTCYKIVEHNWFETFIVFMILLSSGALAFEDIYIEQRKTIKTMLEYADKVFTYIFILEMLLKWVAYGFQVYFTNAWCWLDFLIVDVSLVSLTANALGYSELGAIKSLRTLRALRPLRALSRFEGMRVVVNALLGAIPSIMNVLLVCLIFWLIFSIMGVNLFAGKFYHCINYTTGEMFDVSVVNNYSECKALIESNQTARWKNVKVNFDNVGLGYLSLLQVATFKGWMDIMYAAVDSRNVELQPKYEDNLYMYLYFVIFIIFGSFFTLNLFIGVIIDNFNQQKKKFGGQDIFMTEEQKKYYNAMKKLGSKKPQKPIPRPANKFQGMVFDFVTKQVFDISIMILICLNMVTMMVETDDQSQEMTNILYWINLVFIVLFTGECVLKLISLRYYYFTIGWNIFDFVVVILSIVGMFLAELIEKYFVSPTLFRVIRLARIGRILRLIKGAKGIRTLLFALMMSLPALFNIGLLLFLVMFIYAIFGMSNFAYVKREVGIDDMFNFETFGNSMICLFQITTSAGWDGLLAPILNSGPPDCDPDKDHPGSSVKGDCGNPSVGIFFFVSYIIISFLVVVNMYIAVILENFSVATEESAEPLSEDDFEMFYEVWEKFDPDATQFIEFAKLSDFADALDPPLLIAKPNKVQLIAMDLPMVSGDRIHCLDILFAFTKRVLGESGEMDALRIQMEERFMASNPSKVSYEPITTTLKRKQEEVSAIIIQRAYRRYLLKQKVKKVSSIYKKDKGKECDGTPIKEDTLIDKLNENSTPEKTDMTPSTTSPPSYDSVTKPEKEKFEKDKSEKEDKGKDIRESKK

SEQ ID NO: 17608 - protein, 20 aa, Artificial Sequence
  Synthetic polypeptide
HKVFWVLVIFTENSHNLETE

SEQ ID NO: 17609 - protein, 5 aa, Artificial Sequence
  Synthetic polypeptide
SQLRN

SEQ ID NO: 17610 - protein, 12 aa, Artificial Sequence
  Synthetic polypeptide
ARLCMEVLMLPS

SEQ ID NO: 17611 - protein, 844 aa, Artificial Sequence
  Synthetic polypeptide
EASTDLSFSRNKPGCVWRFSCCQVNIESGKGKIWWNIRKTCYKIVEHSWFESFIVLMILLSSGALAFEDIYIERKKTIKIILEYADKIFTYIFILEMLLKWIAYGYKTYFTNAWCWLDFLIVDVSLVTLVANTLGYSDLGPIKSLRTLRALRPLRALSRFEGMRVVVNALIGAIPSIMNVLLVCLIFWLIFSIMGVNLFAGKFYECINTTDGSRFPASQVPNRSECFALMNVSQNVRWKNLKVNFDNVGLGYLSLLQVATFKGWTIIMYAAVDSVNVDKQPKYEYSLYMYIYFVVFIIFGSFFTLNLFIGVIIDNFNQQKKKLGGQDIFMTEEQKKYYNAMKKLGSKKPQKPIPRPGNKIQGCIFDLVTNQAFDISIMVLICLNMVTMMVEKEGQSQHMTEVLYWINVVFIILFTGECVLKLISLRHYYFTVGWNIFDFVVVIISIVGMFLADLIETYFVSPTLFRVIRLARIGRILRLVKGAKGIRTLLFALMMSLPALFNIGLLLFLVMFIYAIFGMSNFAYVKKEDGINDMFNFETFGNSMICLFQITTSAGWDGLLAPILNSKPPDCDPKKVHPGSSVEGDCGNPSVGIFYFVSYIIISFLVVVNMYIAVILENFSVATEESTEPLSEDDFEMFYEVWEKFDPDATQFIEFSKLSDFAAALDPPLLIAKPNKVQLIAMDLPMVSGDRIHCLDILFAFTKRVLGESGEMDSLRSQMEERFMSANPSKVSYEPITTTLKRKQEDVSATVIQRAYRRYRLRQNVKNISSIYIKDGDRDDDLLNKKDMAFDNVNENSSPEKTDATSSTTSPPSYDSVTKPDKEKYEQDRTEKEDKGKDSKESKK

SEQ ID NO: 17612 - protein, 34 aa, Artificial Sequence
  Synthetic polypeptide
FNPGSISSRKPLLISLSQEISQVVYGGSHAAKLT

SEQ ID NO: 17613 - protein, 239 aa, Artificial Sequence
  Synthetic polypeptide
FQHFGRLRRADHKVRRLRPSWLTRYGDYYVWNKVTTCIHNILSGRRWIEHYGEVTIRNTKSSVCICKLTFVKVNYWNSNMNEVQGVVIDQEGKAVYRLFGKWHEGLYCGVAPSAKCIWRPGSMPTNYELYYGFTRFAIELNELDPVLKDLLPPTDARFRPDQRFLEEGNLEAAASEKQRVEELQRSRRRYMEENNLEHIPKFFKKVIDANQREAWVSNDTYWELRKDPGFSKVDSPVLW

SEQ ID NO: 17614 - protein, 41 aa, Artificial Sequence
  Synthetic polypeptide
GQARWLTPVIPALWEAEAGGSQGQEIETILANKVWRLLCVE

SEQ ID NO: 17615 - protein, 25 aa, Artificial Sequence
  Synthetic polypeptide
QGMEITMCGIKSPLAYTTSSVGEDG

SEQ ID NO: 17616 - protein, 28 aa, Artificial Sequence
  Synthetic polypeptide
IEITKNEAMDMCIWKEHHRNLWWRMLMC

SEQ ID NO: 17617 - protein, 22 aa, Artificial Sequence
  Synthetic polypeptide
PRMKQWICVFGKSTTETCGGEC

SEQ ID NO: 17618 - protein, 273 aa, Artificial Sequence
  Synthetic polypeptide
SNGYVYLERAPQKLVVENVDVLTQMRTSFDKPDQMAALFKRLSSVDSVLKRMTIIGVILSFRSLAQEALRDVLSYHIPFLVSSIEDFKDHIPRETDMKVAMNVYELSSAAGLPCEIDPALVVALSSQKSENISPEEEYKIACLLMVFVAVSLPTLASNVMSQYSPAIEGHCNNIHCLAKAINQIAAALFTIHKGSIEDRLKEFLALASSSLLKIGQETDKTTTRNRESVYLLLDMIVQESPFLTMDLLESCFPYVLLRNAYHAVYKQSVTSSA

SEQ ID NO: 17619 - protein, 23 aa, Artificial Sequence
  Synthetic polypeptide
EDLMNYKLLLKIWLYFVPWDPKY

SEQ ID NO: 17620 - protein, 14 aa, Artificial Sequence
  Synthetic polypeptide
IAIKNLALFCAMGS

SEQ ID NO: 17621 - protein, 866 aa, Artificial Sequence
  Synthetic polypeptide
KFGFILCHGILNTDATALNLWKLALQSSSCLSLFRDEVFHIHKAAEDLFVNIRGYNKRINDIRECKEAAVSHAGSMHRERRKFLRSALKELATVLSDQPGLLGPKALFVFMALSFARDEIIWLLRHADNMPKKSADDFIDKHIAELIFYMEELRAHVRKYGPVMQRYYVQYLSGFDAVVLNELVQNLSVCPEDESIIMSSFVNTMTSLSVKQVEDGEVFDFRGMRLDWFRLQAYTSVSKASLGLADHRELGKMMNTIIFHTKMVDSLVEMLVETSDLSIFCFYSRAFEKMFQQCLELPSQSRYSIAFPLLCTHFMSCTHELCPEERHHIGDRSLSLCNMFLDEMAKQARNLITDICTEQCTLSDQLLPKHCAKTISQAVNKKSKKQTGKKGEPEREKPGVESMRKNRLVVTNLDKLHTALSELCFSINYVPNMVVWEHTFTPREYLTSHLEIRFTKSIVGMTMYNQATQEIAKPSELLTSVRAYMTVLQSIENYVQIDITRVFNNVLLQQTQHLDSHGEPTITSLYTNWYLETLLRQVSNGHIAYFPAMKAFVNLPTENELTFNAEEYSDISEMRSLSELLGPYGMKFLSESLMWHISSQVAELKKLVVENVDVLTQMRTSFDKPDQMAALFKRLSSVDSVLKRMTIIGVILSFRSLAQEALRDVLSYHIPFLVSSIEDFKDHIPRETDMKVAMNVYELSSAAGLPCEIDPALVVALSSQKSENISPEEEYKIACLLMVFVAVSLPTLASNVMSQYSPAIEGHCNNIHCLAKAINQIAAALFTIHKGSIEDRLKEFLALASSSLLKIGQETDKTTTRNRESVYLLLDMIVQESPFLTMDLLESCFPYVLLRNAYHAVYKQSVTSSA

SEQ ID NO: 17622 - protein, 10 aa, Artificial Sequence
  Synthetic polypeptide
CLALFCAMGS

SEQ ID NO: 17623 - protein, 14 aa, Artificial Sequence
  Synthetic polypeptide
SDVWLYFVPWDPKY

SEQ ID NO: 17624 - protein, 872 aa, Artificial Sequence
  Synthetic polypeptide
VHANEVMFGFILCHGILNTDATALNLWKLALQSSSCLSLFRDEVFHIHKAAEDLFVNIRGYNKRINDIRECKEAAVSHAGSMHRERRKFLRSALKELATVLSDQPGLLGPKALFVFMALSFARDEIIWLLRHADNMPKKSADDFIDKHIAELIFYMEELRAHVRKYGPVMQRYYVQYLSGFDAVVLNELVQNLSVCPEDESIIMSSFVNTMTSLSVKQVEDGEVFDFRGMRLDWFRLQAYTSVSKASLGLADHRELGKMMNTIIFHTKMVDSLVEMLVETSDLSIFCFYSRAFEKMFQQCLELPSQSRYSIAFPLLCTHFMSCTHELCPEERHHIGDRSLSLCNMFLDEMAKQARNLITDICTEQCTLSDQLLPKHCAKTISQAVNKKSKKQTGKKGEPEREKPGVESMRKNRLVVTNLDKLHTALSELCFSINYVPNMVVWEHTFTPREYLTSHLEIRFTKSIVGMTMYNQATQEIAKPSELLTSVRAYMTVLQSIENYVQIDITRVFNNVLLQQTQHLDSHGEPTITSLYTNWYLETLLRQVSNGHIAYFPAMKAFVNLPTENELTFNAEEYSDISEMRSLSELLGPYGMKFLSESLMWHISSQVAELKKLVVENVDVLTQMRTSFDKPDQMAALFKRLSSVDSVLKRMTIIGVILSFRSLAQEALRDVLSYHIPFLVSSIEDFKDHIPRETDMKVAMNVYELSSAAGLPCEIDPALVVALSSQKSENISPEEEYKIACLLMVFVAVSLPTLASNVMSQYSPAIEGHCNNIHCLAKAINQIAAALFTIHKGSIEDRLKEFLALASSSLLKIGQETDKTTTRNRESVYLLLDMIVQESPFLTMDLLESCFPYVLLRNAYHAVYKQSVTSSA

SEQ ID NO: 17625 - protein, 72 aa, Artificial Sequence; identical to SEQ ID NO: 4133
  Synthetic polypeptide

SEQ ID NO: 17626 - protein, 22 aa, Artificial Sequence
  Synthetic polypeptide
HWHVETPRQNHPILSTKTWNLL

SEQ ID NO: 17627 - protein, 1121 aa, Artificial Sequence; identical to SEQ ID NO: 1518
  Synthetic polypeptide

SEQ ID NO: 17628 - protein, 78 aa, Artificial Sequence
  Synthetic polypeptide
EFSNIARTSLEGMWRPQGKTILSYRQKPGICCEIHSQKIPCCRNPQQQSTACTTTERKIRDSEKSGIILLHICRCYGI

SEQ ID NO: 17629 - protein, 28 aa, Artificial Sequence
  Synthetic polypeptide
HCKDKFGRHVETPRQNHPILSTKTWNLL

SEQ ID NO: 17630 - protein, 1127 aa, Artificial Sequence
  Synthetic polypeptide
VVVGLRALGQKLRDLHSNLHSVTESSLTLQGQVWKACGDPKAKPSYLIDKNLESAVKFIVRKFPAVETRNNNQQLAQLQKEKSEILKNLALYYFTFVDVMEFKDHVCELLNTIDVCQVFFDITVNFDLTKNYLDLIITYTTLMILLSRIEERKAIIGLYNYAHEMTHGASDREYPRLGQMIVDYENPLKKMMEEFVPHSKSLSDALISLQMVYPRRNLSADQWRNAQLLSLISAPSTMLNPAQSDTMPCEYLSLDAMEKWIIFGFILCHGILNTDATALNLWKLALQSSSCLSLFRDEVFHIHKAAEDLFVNIRGYNKRINDIRECKEAAVSHAGSMHRERRKFLRSALKELATVLSDQPGLLGPKALFVFMALSFARDEIIWLLRHADNMPKKSADDFIDKHIAELIFYMEELRAHVRKYGPVMQRYYVQYLSGFDAVVLNELVQNLSVCPEDESIIMSSFVNTMTSLSVKQVEDGEVFDFRGMRLDWFRLQAYTSVSKASLGLADHRELGKMMNTIIFHTKMVDSLVEMLVETSDLSIFCFYSRAFEKMFQQCLELPSQSRYSIAFPLLCTHFMSCTHELCPEERHHIGDRSLSLCNMFLDEMAKQARNLITDICTEQCTLSDQLLPKHCAKTISQAVNKKSKKQTGKKGEPEREKPGVESMRKNRLVVTNLDKLHTALSELCFSINYVPNMVVWEHTFTPREYLTSHLEIRFTKSIVGMTMYNQATQEIAKPSELLTSVRAYMTVLQSIENYVQIDITRVFNNVLLQQTQHLDSHGEPTITSLYTNWYLETLLRQVSNGHIAYFPAMKAFVNLPTENELTFNAEEYSDISEMRSLSELLGPYGMKFLSESLMWHISSQVAELKKLVVENVDVLTQMRTSFDKPDQMAALFKRLSSVDSVLKRMTIIGVILSFRSLAQEALRDVLSYHIPFLVSSIEDFKDHIPRETDMKVAMNVYELSSAAGLPCEIDPALVVALSSQKSENISPEEEYKIACLLMVFVAVSLPTLASNVMSQYSPAIEGHCNNIHCLAKAINQIAAALFTIHKGSIEDRLKEFLALASSSLLKIGQETDKTTTRNRESVYLLLDMIVQESPFLTMDLLESCFPYVLLRNAYHAVYKQSVTSSA

SEQ ID NO: 17631 - protein, 23 aa, Artificial Sequence
  Synthetic polypeptide
FQIGRRKESNVPNTKKRAKCSRQ

SEQ ID NO: 17632 - protein, 25 aa, Artificial Sequence
  Synthetic polypeptide
MFKAIEIMPRMIHWNLSPISGLEHL

SEQ ID NO: 17633 - protein, 961 aa, Artificial Sequence; identical to SEQ ID NO: 1560
  Synthetic polypeptide

SEQ ID NO: 17634 - protein, 925 aa, Artificial Sequence; identical to SEQ ID NO: 1585
  Synthetic polypeptide

SEQ ID NO: 17635 - protein, 50 aa, Artificial Sequence
  Synthetic polypeptide
LGIIKRDIENKTIKLCSKILYSPKILQLLLHMGVKIKKELFISSMEDQQA

SEQ ID NO: 17636 - protein, 664 aa, Artificial Sequence
  Synthetic polypeptide
PQDIAIAAPYGGEDKKGIVYIFNGRSTGLNAVPSQILEGQWAARSMPPSFGYSMKGATDIDKNGYPDLIVGAFGVDRAILYRARPVITVNAGLEVYPSILNQDNKTCSLPGTALKVSCFNVRFCLKADGKGVLPRKLNFQVELLLDKLKQKGAIRRALFLYSRSPSHSKNMTISRGGLMQCEELIAYLRDESEFRDKLTPITIFMEYRLDYRTAADTTGLQPILNQFTPANISRQAHILLDCGEDNVCKPKLEVSVDSDQKKIYIGDDNPLTLIVKAQNQGEGAYEAELIVSIPLQADFIGVVRNNEALARLSCAFKTENQTRQVVCDLGNPMKAGTQLLAGLRFSVHQQSEMDTSVKFDLQIQSSNLFDKVSPVVSHKVDLAVLAAVEIRGVSSPDHVFLPIPNWEHKENPETEEDVGPVVQHIYELRNNGPSSFSKAMLHLQWPYKYNNNTLLYILHYDIDGPMNCTSDMEINPLRIKISSLQTTEKNDTVAGQGERDHLITKRDLALSEGDIHTLGCGVAQCLKIVCQVGRLDRGKSAILYVKSLLWTETFMNKENQNHSYSLKSSASFNVIEFPYKNLPIEDITNSTLVTTNVTWGIQPAPMPVPVWVIILAVLAGLLLLAVLVFVMYRMGFFKRVRPPQEEQEREQLQPHENGEGNSET

SEQ ID NO: 17637 - protein, 20 aa, Artificial Sequence
  Synthetic polypeptide
SYVPKFYIAPRYCNCCSIWG

SEQ ID NO: 17638 - protein, 16 aa, Artificial Sequence
  Synthetic polypeptide
FFLAVQKWNSQKEQKL

SEQ ID NO: 17639 - protein, 61 aa, Artificial Sequence
  Synthetic polypeptide
KCDTFLSLSFFLLPPCKTCLAPPFAFCHDFSWQYRSGTAKRNRSCERCCKETKVCKTYQEI

SEQ ID NO: 17640 - protein, 70 aa, Artificial Sequence
  Synthetic polypeptide
WLKSVTLSSLSRSFSCLHVRLAWPHLLPSAMIFLGSTEVEQPKGTEVVRDAVRKLKFARHIKKSEGQKIP

SEQ ID NO: 17641 - protein, 306 aa, Artificial Sequence
  Synthetic polypeptide
WLKSVTLSSLSRSFSCLHVRLAWPHLLPSAMIFLGSTEVEQPKGTEVVRDAVRKLKFARHIKKSEGQKIPKVELQISIYGVKILEPKTKEVQHNCQLHRISFCADDKTDKRIFTFICKDSESNKHLCYVFDSEKCAEEITLTIGQAFDLAYRKFLESGGKDVETRKQIAGLQKRIQDLETENMELKNKVQDLENQLRITQVSAPPAGSMTPKSPSTDIFDMIPFSPISHQSSMPTRNGTQPPPVPSRSTEIKRDLFGAEPFDPFNCGAADFPPDIQSKLDEMQEGFKMGLTLEGTVFCLDPLDSRC

SEQ ID NO: 17642 - protein, 293 aa, Artificial Sequence
  Synthetic polypeptide
WLKSVTLSSLSRSFSCLHVRLAWPHLLPSAMIFLGSTEVEQPKGTEVVRDAVRKLKFARHIKKSEGQKIPKVELQISIYGVKILEPKTKEVQHNCQLHRISFCADDKTDKRIFTFICKDSESNKHLCYVFDSEKCAEEITLTIGQAFDLAYRKFLESGGKDVETRKQIAGLQKRIQDLETENMELKNKVQDLENQLRITQVSAPPAGSMTPKSPSTDIFDMIPFSPISHQSSMPTRNGTQPPPVPSRSTEIKRDLFGAEPFDPFNCGAADFPPDIQSKLDEMQRQRWRGSKWD

SEQ ID NO: 17643 - protein, 169 aa, Artificial Sequence
  Synthetic polypeptide
WLKSVTLSSLSRSFSCLHVRLAWPHLLPSAMIFLGSTEVEQPKGTEVVRDAVRKLKFARHIKKSEGQKIPKVELQISIYGVKILEPKTKEVQHNCQLHRISFCADDKTDKRIFTFICKDSESNKHLCYVFDSEKCVSIPDVVGWFVLFYKPGIVLLLALAKYLKMNNFL

SEQ ID NO: 17644 - protein, 55 aa, Artificial Sequence
  Synthetic polypeptide
GCLADFLLYPDHHYCKYCKFGQYCYCNHNPKGLDCCCCRRRQKQTSKYECHNTKD

SEQ ID NO: 17645 - protein, 81 aa, Artificial Sequence
  Synthetic polypeptide
MAEETEDAWPTSCYILIITIANIANLASTATAITIQRDWIVVVAGEDRSKLANMNATIRRIDQLTNILAPMAVGQIMTFGS

SEQ ID NO: 17646 - protein, 452 aa, Artificial Sequence
  Synthetic polypeptide
MAEETEDAWPTSCYILIITIANIANLASTATAITIQRDWIVVVAGEDRSKLANMNATIRRIDQLTNILAPMAVGQIMTFGSPVIGCGFISGWNLVSMCVEYVLLWKVYQKTPALAVKAGLKEEETELKQLNLHKDTEPKPLEGTHLMGVKDSNIHELEHEQEPTCASQMAEPFRTFRDGWVSYYNQPVFLAGMGLAFLYMTVLGFDCITTGYAYTQGLSGSILSILMGASAITGIMGTVAFTWLRRKCGLVRTGLISGLAQLSCLILCVISVFMPGSPLDLSVSPFEDIRSRFIQGESITPTKIPEITTEIYMSNGSNSANIVPETSPESVPIISVSLLFAGVIAARIGLWSFDLTVTQLLQENVIESERGIINGVQNSMNYLLDLLHFIMVILAPNPEAFGLLVLISVSFVAMGHIMYFRFAQNTLGNKLFACGPDAKEVRKENQANTSVV

SEQ ID NO: 17647 - protein, 15 aa, Artificial Sequence
  Synthetic polypeptide
WQRKLRMPGRLPAIS

SEQ ID NO: 17648 - protein, 15 aa, Artificial Sequence
  Synthetic polypeptide
GCLAGSLADYLTSAK

SEQ ID NO: 17649 - protein, 45 aa, Artificial Sequence
  Synthetic polypeptide
GCLAGSLADYLTSAKFLLYLGHSLSTWGDRMWHFAVSVFLVELYG

SEQ ID NO: 17650 - protein, 190 aa, Artificial Sequence
  Synthetic polypeptide
GCLAGSLADYLTSAKFLLYLGHSLSTWGDRMWHFAVSVFLVELYGNSLLLTAVYGLVVAGSVLVLGAIIGDWVDKNARLKVAQTSLVVQNVSVILCGIILMMVFLHKHELLTMYHGWVLTSCYILIITIANIANLASTATAITIQRDWIVVVAGEDRSKLANMNATIRRIDQLTNILAPMAVGQIMTFGS

SEQ ID NO: 17651 - protein, 561 aa, Artificial Sequence
  Synthetic polypeptide
GCLAGSLADYLTSAKFLLYLGHSLSTWGDRMWHFAVSVFLVELYGNSLLLTAVYGLVVAGSVLVLGAIIGDWVDKNARLKVAQTSLVVQNVSVILCGIILMMVFLHKHELLTMYHGWVLTSCYILIITIANIANLASTATAITIQRDWIVVVAGEDRSKLANMNATIRRIDQLTNILAPMAVGQIMTFGSPVIGCGFISGWNLVSMCVEYVLLWKVYQKTPALAVKAGLKEEETELKQLNLHKDTEPKPLEGTHLMGVKDSNIHELEHEQEPTCASQMAEPFRTFRDGWVSYYNQPVFLAGMGLAFLYMTVLGFDCITTGYAYTQGLSGSILSILMGASAITGIMGTVAFTWLRRKCGLVRTGLISGLAQLSCLILCVISVFMPGSPLDLSVSPFEDIRSRFIQGESITPTKIPEITTEIYMSNGSNSANIVPETSPESVPIISVSLLFAGVIAARIGLWSFDLTVTQLLQENVIESERGIINGVQNSMNYLLDLLHFIMVILAPNPEAFGLLVLISVSFVAMGHIMYFRFAQNTLGNKLFACGPDAKEVRKENQANTSVV

SEQ ID NO: 17652 - protein, 16 aa, Artificial Sequence
  Synthetic polypeptide
MAEETEDAWPDPWPTT

SEQ ID NO: 17653 - protein, 20 aa, Artificial Sequence
  Synthetic polypeptide
WQRKLRMPGRILGRLPDLCK

SEQ ID NO: 17654 - protein, 50 aa, Artificial Sequence
  Synthetic polypeptide
WQRKLRMPGRILGRLPDLCKIPSLPWSFSLYLGRSDVALCGVCVSGRALW

SEQ ID NO: 17655 - protein, 75 aa, Artificial Sequence
  Synthetic polypeptide
WQRKLRMPGRILGRLPDLCKIPSLPWSFSLYLGRSDVALCGVCVSGRALWKQPPFDSSLRAGGGRVCSGPGSHHR

SEQ ID NO: 17656 - protein, 22 aa, Artificial Sequence
  Synthetic polypeptide
FLHFHLRYRVHLTRECQTVGAD

SEQ ID NO: 17657 - protein, 370 aa, Artificial Sequence
  Synthetic polypeptide
GTGFISLGSARQWAQINVAAKRGMKFVGFISQHYSPSKFCNGTNHDGDIESMLHVRHGSDENCRSWNEGTLSGQSSESGIEEELHHESGQYQMEQNGSPTSSKSRKGEASDNKLYTVFNAFDDDSTSWAYQEGILSMKVTRKGSVISTLDADWLELTTFYYKQGLSLIDSFVFWETSKGEHLPKSLEGFFIYEEEGSGVPGSSRKGNDAIVVEQWTVIEGCEIKTDYGPLLHTLAEFGWLLTSVLPTPVLRHDSEGNLATKQIVFLQRPVMWNSAAQTPDKKASRHIKGEDKNKATSRSIGLDTTSSQPAESRHLPEECRLSPSRECWTKEGRLAQHNSFSGFSSSDNVLRELDDGQFDQEDGVTQVTCM

SEQ ID NO: 17658 - protein, 16 aa, Artificial Sequence
  Synthetic polypeptide
GVPDSGRRLMSLLKEE

SEQ ID NO: 17659 - protein, 1 aa, Artificial Sequence
  Synthetic polypeptide
D

SEQ ID NO: 17660 - protein, 15 aa, Artificial Sequence
  Synthetic polypeptide
FLHFHLRLMSLLKEE

SEQ ID NO: 17661 - protein, 387 aa, Artificial Sequence
  Synthetic polypeptide
GRSQDGRIGTAPVYSSRRERRRRRVISAFPSEINVAAKRGMKFVGFISQHYSPSKFCNGTNHDGDIESMLHVRHGSDENCRSWNEGTLSGQSSESGIEEELHHESGQYQMEQNGSPTSSKSRKGEASDNKLYTVFNAFDDDSTSWAYQEGILSMKVTRKGSVISTLDADWLELTTFYYKQGLSLIDSFVFWETSKGEHLPKSLEGFFIYEEEGSGVPGSSRKGNDAIVVEQWTVIEGCEIKTDYGPLLHTLAEFGWLLTSVLPTPVLRHDSEGNLATKQIVFLQRPVMWNSAAQTPDKKASRHIKGEDKNKATSRSIGLDTTSSQPAESRHLPEECRLSPSRECWTKEGRLAQHNSFSGFSSSDNVLRELDDGQFDQEDGVTQVTCM

SEQ ID NO: 17662 - protein, 1 aa, Artificial Sequence
  Synthetic polypeptide
D

SEQ ID NO: 17663 - protein, 15 aa, Artificial Sequence
  Synthetic polypeptide
FLHFHLRLMSLLKEE

SEQ ID NO: 17664 - protein, 387 aa, Artificial Sequence
  Synthetic polypeptide
GRSQDGRIGTAPVYSAQRERRRRRVISAFPSEINVAAKRGMKFVGFISQHYSPSKFCNGTNHDGDIESMLHVRHGSDENCRSWNEGTLSGQSSESGIEEELHHESGQYQMEQNGSPTSSKSRKGEASDNKLYTVFNAFDDDSTSWAYQEGILSMKVTRKGSVISTLDADWLELTTFYYKQGLSLIDSFVFWETSKGEHLPKSLEGFFIYEEEGSGVPGSSRKGNDAIVVEQWTVIEGCEIKTDYGPLLHTLAEFGWLLTSVLPTPVLRHDSEGNLATKQIVFLQRPVMWNSAAQTPDKKASRHIKGEDKNKATSRSIGLDTTSSQPAESRHLPEECRLSPSRECWTKEGRLAQHNSFSGFSSSDNVLRELDDGQFDQEDGVTQVTCM

SEQ ID NO: 17665 - protein, 70 aa, Artificial Sequence
  Synthetic polypeptide
ASSNPEVIKINSILDIVTKVENYYLKGYIVGAIHPVIQPVGQRKHLPASYLYRVVLLRLKLSPKNSAAPS

SEQ ID NO: 17666 - protein, 455 aa, Artificial Sequence
  Synthetic polypeptide
ASSNPEVIKINSILDIVTKVENYYLKGYIVGAIHPVIQPVGQRKHLPASYLYRVVLLRLKLSPKNSAAPSGQRRPRLVIEECPLTSEAQTNDAAKELIEKINVAAKRGMKFVGFISQHYSPSKFCNGTNHDGDIESMLHVRHGSDENCRSWNEGTLSGQSSESGIEEELHHESGQYQMEQNGSPTSSKSRKGEASDNKLYTVFNAFDDDSTSWAYQEGILSMKVTRKGSVISTLDADWLELTTFYYKQGLSLIDSFVFWETSKGEHLPKSLEGFFIYEEEGSGVPGSSRKGNDAIVVEQWTVIEGCEIKTDYGPLLHTLAEFGWLLTSVLPTPVLRHDSEGNLATKQIVFLQRPVMWNSAAQTPDKKASRHIKGEDKNKATSRSIGLDTTSSQPAESRHLPEECRLSPSRECWTKEGRLAQHNSFSGFSSSDNVLRELDDGQFDQEDGVTQVTCM

SEQ ID NO: 17667 - protein, 31 aa, Artificial Sequence
  Synthetic polypeptide
FLHFHLSFIKPRSHQDKFNSGYSNKSGKLLS

SEQ ID NO: 17668 - protein, 41 aa, Artificial Sequence
  Synthetic polypeptide
GRSQDGRIGTAPVYSAQRERRRRRVISAFPSELHQTQKSSR

SEQ ID NO: 17669 - protein, 12 aa, Artificial Sequence
  Synthetic polypeptide
KYKISREAKPST

SEQ ID NO: 17670 - protein, 148 aa, Artificial Sequence
  Synthetic polypeptide
KYKISREAKPSTEDLGDKKEGEYIKLKVIGQDSSEIHFKVKMTTHLKKLKESYCQRQGVPMNSLRFLFEGQRIADNHTPKEAQWPTPAILALWEAEAGWITAGQELRPAWATWRNLISTKNRKSSQLGMEEEDVIEVYQEQTGGHSTV

SEQ ID NO: 17671 - protein, 103 aa, Artificial Sequence
  Synthetic polypeptide
KYKISREAKPSTEDLGDKKEGEYIKLKVIGQDSSEIHFKVKMTTHLKKLKESYCQRQGVPMNSLRFLFEGQRIADNHTPKELGMEEEDVIEVYQEQTGGHSTV

SEQ ID NO: 17672 - protein, 79 aa, Artificial Sequence
  Synthetic polypeptide
KYKISREAKPSTEDLGDKKEGEYIKLKVIGQDSSEIHFKVKMTTHLKKLKESYCQRQLGMEEEDVIEVYQEQTGGHSTV

SEQ ID NO: 17673 - protein, 60 aa, Artificial Sequence
  Synthetic polypeptide
KYKISREAKPSTEDLGDKKEGEYIKLKVIGQDSSEIHFKVKMTTHLKKLKESYCQRQVSL

SEQ ID NO: 17674 - protein, 7 aa, Artificial Sequence
  Synthetic polypeptide
PGGKTFN

SEQ ID NO: 17675 - protein, 22 aa, Artificial Sequence
  Synthetic polypeptide
PTWRNPVSTKNTKLAGRQNLQL

SEQ ID NO: 17676 - protein, 49 aa, Artificial Sequence
  Synthetic polypeptide
PTWRNPVSTKNTKLAGRQNLQLRTWGIRRKVNILNSKSLDRIAVRFTSK

SEQ ID NO: 17677 - protein, 24 aa, Artificial Sequence
  Synthetic polypeptide
ARHGGSRLQSQHFGRLRNVFVEVL

SEQ ID NO: 17678 - protein, 13 aa, Artificial Sequence
  Synthetic polypeptide
GMFLWKFCNCTRN

SEQ ID NO: 17679 - protein, 223 aa, Artificial Sequence
  Synthetic polypeptide
GQAWWLTPAIPTLREAEECFCGSSVTVPEIEGVLWLKDDGKKSWKKRYFLLRASGIYYVPKGKAKVSRDLVCFLQLDHVNVYYGQDYRNKYKAPTDYCLVLKHPQIQKKSQYIKYLCCDDVRTLHQWVNGIRIAKYGKQLYMNYQEALKRTESAYDWTSLSSSSIKSGSSSSSIPESQSNHSNQSDSGVSDTQPAGHVRSQSIVSSVFSEAWKRGTQLEESSK

SEQ ID NO: 17680 - protein, 881 aa, Artificial Sequence
  Synthetic polypeptide
GQAWWLTPAIPTLREAEECFCGSSVTVPEIEGVLWLKDDGKKSWKKRYFLLRASGIYYVPKGKAKVSRDLVCFLQLDHVNVYYGQDYRNKYKAPTDYCLVLKHPQIQKKSQYIKYLCCDDVRTLHQWVNGIRIAKYGKQLYMNYQEALKRTESAYDWTSLSSSSIKSGSSSSSIPESQSNHSNQSDSGVSDTQPAGHVRSQSIVSSVFSEAWKRGTQLEESSKARMESMNRPYTSLVPPLSPQPKIVTPYTASQPSPPLPPPPPPPPPPPPPPPPPPPPLPSQSAPSAGSAAPMFVKYSTITRLQNASQHSGALFKPPTPPVMQSQSVKPQILVPPNGVVPPPPPPPPPPTPGSAMAQLKPAPCAPSLPQFSAPPPPLKIHQVQHITQVAPPTPPPPPPIPAPLPPQAPPKPLVTIPAPTSTKTVAPVVTQAAPPTPTPPVPPAKKQPAFPASYIPPSPPTPPVPVPPPTLPKQQSFCAKPPPSPLSPVPSVVKQIASQFPPPPTPPAMESQPLKPVPANVAPQSPPAVKAKPKWQPSSIPVPSPDFPPPPPESSLVFPPPPPSPVPAPPPPPPPTASPTPDKSGSPGKKTSKTSSPGGKKPPPTPQRNSSIKSSSGAEHPEPKRPSVDSLVSKFTPPAESGSPSKETLPPPAAPPKPGKLNLSGVNLPGVLQQGCVSAKAPVLSGRGKDSVVEFPSPPSDSDFPPPPPETELPLPPIEIPAVFSGNTSPKVAVVNPQPQQWSKMSVKKAPPPTRPKRNDSTRLTQAEISEQPTMATVVPQVPTSPKSSLSVQPGFLADLNRTLQRKSITRHGSLSSRMSRAEPTATMDDMALPPPPPELLSDQQKAGYGGSHISGYATLRRGPPPAPPKRDQNTKLSRDW

SEQ ID NO: 17681 - protein, 225 aa, Artificial Sequence
  Synthetic polypeptide
GQAWWLTPAIPTLREAEECFCGSSVTVPEIEGVLWLKDDGKKSWKKRYFLLRASGIYYVPKGKAKVSRDLVCFLQLDHVNVYYGQDYRNKYKAPTDYCLVLKHPQIQKKSQYIKYLCCDDVRTLHQWVNGIRIAKYGKQLYMNYQEALKRTESAYDWTSLSSSSIKSGSSSSSIPESQSNHSNQSDSGVSDTQPAGHVRSQSIVSSVFSEAWKRGTQLEESSKIN

SEQ ID NO: 17682 - protein, 228 aa, Artificial Sequence
  Synthetic polypeptide
GQAWWLTPAIPTLREAEECFCGSSVTVPEIEGVLWLKDDGKKSWKKRYFLLRASGIYYVPKGKAKVSRDLVCFLQLDHVNVYYGQDYRNKYKAPTDYCLVLKHPQIQKKSQYIKYLCCDDVRTLHQWVNGIRIAKYGKQLYMNYQEALKRTESAYDWTSLSSSSIKSGSSSSSIPESQSNHSNQSDSGVSDTQPAGHVRSQSIVSSVFSEAWKRGTQLEESSKVTASF

SEQ ID NO: 17683 - protein, 111 aa, Artificial Sequence
  Synthetic polypeptide
AWGGGKSSSEWGKPYALELACNMEQLSDEEIDHGAEEDSDKEDQDLDKMFGAWLGELDKLTQSLDSDKPMEPVKRSPLRQETNMANFSYRFSIYNLNALNQGETVDLDALM

SEQ ID NO: 17684 - protein, 194 aa, Artificial Sequence
  Synthetic polypeptide
AWGGGKSSSEWGKPYALELACNMEQLSDEEIDHGAEEDSDKEDQDLDKMFGAWLGELDKLTQSLDSDKPMEPVKRSPLRQETNMANFSYRFSIYNLNEALNQGETVDLDALMADLCSIEQELSSIGSGNSKRQITETKATQKLPVSRHTLKHGTLKGLSSSSNRIAKPSHASYSLDDVTAQLEQASLSMDEAAQ

SEQ ID NO: 17685 - protein, 614 aa, Artificial Sequence
  Synthetic polypeptide
AWGGGKSSSEWGKPYALELACNMEQLSDEEIDHGAEEDSDKEDQDLDKMFGAWLGELDKLTQSLDSDKPMEPVKRSPLRQETNMANFSYRFSIYNLNEALNQGETVDLDALMADLCSIEQELSSIGSGNSKRQITETKATQKLPVSRHTLKHGTLKGLSSSSNRIAKPSHASYSLDDVTAQLEQASLSMDEAAQQSVLEDTKPLVTNQHRRTASAGTVSDAEVHSISNSSHSSITSAASSMDSLDIDKVTRPQELDLTHQGQPITEEEQAAKLKAEKIRVALEKIKEAQVKKLVIRVHMSDDSSKTMMVDERQTVRQVLDNLMDKSHCGYSLDWSLVETVSELQMERIFEDHENLVENLLNWTRDSQNKLIFMERIEKYALFKNPQNYLLGKKETAEMADRNKEVLLEECFCGSSVTVPEIEGVLWLKDDGKKSWKKRYFLLRASGIYYVPKGKAKVSRDLVCFLQLDHVNVYYGQDYRNKYKAPTDYCLVLKHPQIQKKSQYIKYLCCDDVRTLHQWVNGIRIAKYGKQLYMNYQEALKRTESAYDWTSLSSSSIKSGSSSSSIPESQSNHSNQSDSGVSDTQPAGHVRSQSIVSSVFSEAWKRGTQLEESSK

SEQ ID NO: 17686 - protein, 1272 aa, Artificial Sequence
  Synthetic polypeptide
AWGGGKSSSEWGKPYALELACNMEQLSDEEIDHGAEEDSDKEDQDLDKMFGAWLGELDKLTQSLDSDKPMEPVKRSPLRQETNMANFSYRFSIYNLNEALNQGETVDLDALMADLCSIEQELSSIGSGNSKRQITETKATQKLPVSRHTLKHGTLKGLSSSSNRIAKPSHASYSLDDVTAQLEQASLSMDEAAQQSVLEDTKPLVTNQHRRTASAGTVSDAEVHSISNSSHSSITSAASSMDSLDIDKVTRPQELDLTHQGQPITEEEQAAKLKAEKIRVALEKIKEAQVKKLVIRVHMSDDSSKTMMVDERQTVRQVLDNLMDKSHCGYSLDWSLVETVSELQMERIFEDHENLVENLLNWTRDSQNKLIFMERIEKYALFKNPQNYLLGKKETAEMADRNKEVLLEECFCGSSVTVPEIEGVLWLKDDGKKSWKKRYFLLRASGIYYVPKGKAKVSRDLVCFLQLDHVNVYYGQDYRNKYKAPTDYCLVLKHPQIQKKSQYIKYLCCDDVRTLHQWVNGIRIAKYGKQLYMNYQEALKRTESAYDWTSLSSSSIKSGSSSSSIPESQSNHSNQSDSGVSDTQPAGHVRSQSIVSSVFSEAWKRGTQLEESSKARMESMNRPYTSLVPPLSPQPKIVTPYTASQPSPPLPPPPPPPPPPPPPPPPPPPPLPSQSAPSAGSAAPMFVKYSTITRLQNASQHSGALFKPPTPPVMQSQSVKPQILVPPNGVVPPPPPPPPPPTPGSAMAQLKPAPCAPSLPQFSAPPPPLKIHQVQHITQVAPPTPPPPPPIPAPLPPQAPPKPLVTIPAPTSTKTVAPVVTQAAPPTPTPPVPPAKKQPAFPASYIPPSPPTPPVPVPPPTLPKQQSFCAKPPPSPLSPVPSVVKQIASQFPPPPTPPAMESQPLKPVPANVAPQSPPAVKAKPKWQPSSIPVPSPDFPPPPPESSLVFPPPPPSPVPAPPPPPPPTASPTPDKSGSPGKKTSKTSSPGGKKPPPTPQRNSSIKSSSGAEHPEPKRPSVDSLVSKFTPPAESGSPSKETLPPPAAPPKPGKLNLSGVNLPGVLQQGCVSAKAPVLSGRGKDSVVEFPSPPSDSDFPPPPPETELPLPPIEIPAVFSGNTSPKVAVVNPQPQQWSKMSVKKAPPPTRPKRNDSTRLTQAEISEQPTMATVVPQVPTSPKSSLSVQPGFLADLNRTLQRKSITRHGSLSSRMSRAEPTATMDDMALPPPPPELLSDQQKAGYGGSHISGYATLRRGPPPAPPKRDQNTKLSRDW

SEQ ID NO: 17687 - protein, 616 aa, Artificial Sequence
  Synthetic polypeptide
AWGGGKSSSEWGKPYALELACNMEQLSDEEIDHGAEEDSDKEDQDLDKMFGAWLGELDKLTQSLDSDKPMEPVKRSPLRQETNMANFSYRFSIYNLNEALNQGETVDLDALMADLCSIEQELSSIGSGNSKRQITETKATQKLPVSRHTLKHGTLKGLSSSSNRIAKPSHASYSLDDVTAQLEQASLSMDEAAQQSVLEDTKPLVTNQHRRTASAGTVSDAEVHSISNSSHSSITSAASSMDSLDIDKVTRPQELDLTHQGQPITEEEQAAKLKAEKIRVALEKIKEAQVKKLVIRVHMSDDSSKTMMVDERQTVRQVLDNLMDKSHCGYSLDWSLVETVSELQMERIFEDHENLVENLLNWTRDSQNKLIFMERIEKYALFKNPQNYLLGKKETAEMADRNKEVLLEECFCGSSVTVPEIEGVLWLKDDGKKSWKKRYFLLRASGIYYVPKGKAKVSRDLVCFLQLDHVNVYYGQDYRNKYKAPTDYCLVLKHPQIQKKSQYIKYLCCDDVRTLHQWVNGIRIAKYGKQLYMNYQEALKRTESAYDWTSLSSSSIKSGSSSSSIPESQSNHSNQSDSGVSDTQPAGHVRSQSIVSSVFSEAWKRGTQLEESSKIN

SEQ ID NO: 17688 - protein, 619 aa, Artificial Sequence
  Synthetic polypeptide
AWGGGKSSSEWGKPYALELACNMEQLSDEEIDHGAEEDSDKEDQDLDKMFGAWLGELDKLTQSLDSDKPMEPVKRSPLRQETNMANFSYRFSIYNLNEALNQGETVDLDALMADLCSIEQELSSIGSGNSKRQITETKATQKLPVSRHTLKHGTLKGLSSSSNRIAKPSHASYSLDDVTAQLEQASLSMDEAAQQSVLEDTKPLVTNQHRRTASAGTVSDAEVHSISNSSHSSITSAASSMDSLDIDKVTRPQELDLTHQGQPITEEEQAAKLKAEKIRVALEKIKEAQVKKLVIRVHMSDDSSKTMMVDERQTVRQVLDNLMDKSHCGYSLDWSLVETVSELQMERIFEDHENLVENLLNWTRDSQNKLIFMERIEKYALFKNPQNYLLGKKETAEMADRNKEVLLEECFCGSSVTVPEIEGVLWLKDDGKKSWKKRYFLLRASGIYYVPKGKAKVSRDLVCFLQLDHVNVYYGQDYRNKYKAPTDYCLVLKHPQIQKKSQYIKYLCCDDVRTLHQWVNGIRIAKYGKQLYMNYQEALKRTESAYDWTSLSSSSIKSGSSSSSIPESQSNHSNQSDSGVSDTQPAGHVRSQSIVSSVFSEAWKRGTQLEESSKVTASF

SEQ ID NO: 17689 - protein, 641 aa, Artificial Sequence
  Synthetic polypeptide
AWGGGKSSSEWGKPYALELACNMEQLSDEEIDHGAEEDSDKEDQDLDKMFGAWLGELDKLTQSLDSDKPMEPVKRSPLRQETNMANFSYRFSIYNLNEALNQGETVDLDALMADLCSIEQELSSIGSGNSKRQITETKATQKLPVSRHTLKHGTLKGLSSSSNRIAKPSHASYSLDDVTAQLEQASLSMDEAAQQSVLEDTKPLVTNQHRRTASAGTVSDAEVHSISNSSHSSITSAASSMDSLDIDKVTRPQELDLTHQGQPITEHAISLRCSSKQAKRHIDFTEEQAELTPEEQAAKLKAEKIRVALEKIKEAQVKKLVIRVHMSDDSSKTMMVDERQTVRQVLDNLMDKSHCGYSLDWSLVETVSELQMERIFEDHENLVENLLNWTRDSQNKLIFMERIEKYALFKNPQNYLLGKKETAEMADRNKEVLLEECFCGSSVTVPEIEGVLWLKDDGKKSWKKRYFLLRASGIYYVPKGKAKVSRDLVCFLQLDHVNVYYGQDYRNKYKAPTDYCLVLKHPQIQKKSQYIKYLCCDDVRTLHQWVNGIRIAKYGKQLYMNYQEALKRTESAYDWTSLSSSSIKSGSSSSSIPESQSNHSNQSDSGVSDTQPAGHVRSQSIVSSVFSEAWKRGTQLEESSK

SEQ ID NO: 17690 - protein, 666 aa, Artificial Sequence
  Synthetic polypeptide
AWGGGKSSSEWGKPYALELACNMEQLSDEEIDHGAEEDSDKEDQDLDKMFGAWLGELDKLTQSLDSDKPMEPVKRSPLRQETNMANFSYRFSIYNLNEALNQGETVDLDALMADLCSIEQELSSIGSGNSKRQITETKATQKLPVSRHTLKHGTLKGLSSSSNRIAKPSHASYSLDDVTAQLEQASLSMDEAAQQSVLEDTKPLVTNQHRRTASAGTVSDAEVHSISNSSHSSITSAASSMDSLDIDKVTRPQELDLTHQGQPITEHAISLRCSSKQAKRHIDFTEEQAELTPHSYLDRETSLLLRNIAGKPSHLLTKEEQAAKLKAEKIRVALEKIKEAQVKKLVIRVHMSDDSSKTMMVDERQTVRQVLDNLMDKSHCGYSLDWSLVETVSELQMERIFEDHENLVENLLNWTRDSQNKLIFMERIEKYALFKNPQNYLLGKKETAEMADRNKEVLLEECFCGSSVTVPEIEGVLWLKDDGKKSWKKRYFLLRASGIYYVPKGKAKVSRDLVCFLQLDHVNVYYGQDYRNKYKAPTDYCLVLKHPQIQKKSQYIKYLCCDDVRTLHQWVNGIRIAKYGKQLYMNYQEALKRTESAYDWTSLSSSSIKSGSSSSSIPESQSNHSNQSDSGVSDTQPAGHVRSQSIVSSVFSEAWKRGTQLEESSK

SEQ ID NO: 17691 - protein, 1324 aa, Artificial Sequence
  Synthetic polypeptide
AWGGGKSSSEWGKPYALELACNMEQLSDEEIDHGAEEDSDKEDQDLDKMFGAWLGELDKLTQSLDSDKPMEPVKRSPLRQETNMANFSYRFSIYNLNEALNQGETVDLDALMADLCSIEQELSSIGSGNSKRQITETKATQKLPVSRHTLKHGTLKGLSSSSNRIAKPSHASYSLDDVTAQLEQASLSMDEAAQQSVLEDTKPLVTNQHRRTASAGTVSDAEVHSISNSSHSSITSAASSMDSLDIDKVTRPQELDLTHQGQPITEHAISLRCSSKQAKRHIDFTEEQAELTPHSYLDRETSLLLRNIAGKPSHLLTKEEQAAKLKAEKIRVALEKIKEAQVKKLVIRVHMSDDSSKTMMVDERQTVRQVLDNLMDKSHCGYSLDWSLVETVSELQMERIFEDHENLVENLLNWTRDSQNKLIFMERIEKYALFKNPQNYLLGKKETAEMADRNKEVLLEECFCGSSVTVPEIEGVLWLKDDGKKSWKKRYFLLRASGIYYVPKGKAKVSRDLVCFLQLDHVNVYYGQDYRNKYKAPTDYCLVLKHPQIQKKSQYIKYLCCDDVRTLHQWVNGIRIAKYGKQLYMNYQEALKRTESAYDWTSLSSSSIKSGSSSSSIPESQSNHSNQSDSGVSDTQPAGHVRSQSIVSSVFSEAWKRGTQLEESSKARMESMNRPYTSLVPPLSPQPKIVTPYTASQPSPPLPPPPPPPPPPPPPPPPPPPPLPSQSAPSAGSAAPMFVKYSTITRLQNASQHSGALFKPPTPPVMQSQSVKPQILVPPNGVVPPPPPPPPPPTPGSAMAQLKPAPCAPSLPQFSAPPPPLKIHQVQHITQVAPPTPPPPPPIPAPLPPQAPPKPLVTIPAPTSTKTVAPVVTQAAPPTPTPPVPPAKKQPAFPASYIPPSPPTPPVPVPPPTLPKQQSFCAKPPPSPLSPVPSVVKQIASQFPPPPTPPAMESQPLKPVPANVAPQSPPAVKAKPKWQPSSIPVPSPDFPPPPPESSLVFPPPPPSPVPAPPPPPPPTASPTPDKSGSPGKKTSKTSSPGGKKPPPTPQRNSSIKSSSGAEHPEPKRPSVDSLVSKFTPPAESGSPSKETLPPPAAPPKPGKLNLSGVNLPGVLQQGCVSAKAPVLSGRGKDSVVEFPSPPSDSDFPPPPPETELPLPPIEIPAVFSGNTSPKVAVVNPQPQQWSKMSVKKAPPPTRPKRNDSTRLTQAEISEQPTMATVVPQVPTSPKSSLSVQPGFLADLNRTLQRKSITRHGSLSSRMSRAEPTATMDDMALPPPPPELLSDQQKAGYGGSHISGYATLRRGPPPAPPKRDQNTKLSRDW

SEQ ID NO: 17692 - protein, 671 aa, Artificial Sequence
  Synthetic polypeptide
AWGGGKSSSEWGKPYALELACNMEQLSDEEIDHGAEEDSDKEDQDLDKMFGAWLGELDKLTQSLDSDKPMEPVKRSPLRQETNMANFSYRFSIYNLNEALNQGETVDLDALMADLCSIEQELSSIGSGNSKRQITETKATQKLPVSRHTLKHGTLKGLSSSSNRIAKPSHASYSLDDVTAQLEQASLSMDEAAQQSVLEDTKPLVTNQHRRTASAGTVSDAEVHSISNSSHSSITSAASSMDSLDIDKVTRPQELDLTHQGQPITEHAISLRCSSKQAKRHIDFTEEQAELTPHSYLDRETSLLLRNIAGKPSHLLTKEEQAAKLKAEKIRVALEKIKEAQVKKLVIRVHMSDDSSKTMMVDERQTVRQVLDNLMDKSHCGYSLDWSLVETVSELQMERIFEDHENLVENLLNWTRDSQNKLIFMERIEKYALFKNPQNYLLGKKETAEMADRNKEVLLEECFCGSSVTVPEIEGVLWLKDDGKKSWKKRYFLLRASGIYYVPKGKAKVSRDLVCFLQLDHVNVYYGQDYRNKYKAPTDYCLVLKHPQIQKKSQYIKYLCCDDVRTLHQWVNGIRIAKYGKQLYMNYQEALKRTESAYDWTSLSSSSIKSGSSSSSIPESQSNHSNQSDSGVSDTQPAGHVRSQSIVSSVFSEAWKRGTQLEESSKVTASF

SEQ ID NO: 17693 - protein, 639 aa, Artificial Sequence
  Synthetic polypeptide
AWGGGKSSSEWGKPYALELACNMEQLSDEEIDHGAEEDSDKEDQDLDKMFGAWLGELDKLTQSLDSDKPMEPVKRSPLRQETNMANFSYRFSIYNLNEALNQGETVDLDALMADLCSIEQELSSIGSGNSKRQITETKATQKLPVSRHTLKHGTLKGLSSSSNRIAKPSHASYSLDDVTAQLEQASLSMDEAAQQSVLEDTKPLVTNQHRRTASAGTVSDAEVHSISNSSHSSITSAASSMDSLDIDKVTRPQELDLTHQGQPITEHSYLDRETSLLLRNIAGKPSHLLTKEEQAAKLKAEKIRVALEKIKEAQVKKLVIRVHMSDDSSKTMMVDERQTVRQVLDNLMDKSHCGYSLDWSLVETVSELQMERIFEDHENLVENLLNWTRDSQNKLIFMERIEKYALFKNPQNYLLGKKETAEMADRNKEVLLEECFCGSSVTVPEIEGVLWLKDDGKKSWKKRYFLLRASGIYYVPKGKAKVSRDLVCFLQLDHVNVYYGQDYRNKYKAPTDYCLVLKHPQIQKKSQYIKYLCCDDVRTLHQWVNGIRIAKYGKQLYMNYQEALKRTESAYDWTSLSSSSIKSGSSSSSIPESQSNHSNQSDSGVSDTQPAGHVRSQSIVSSVFSEAWKRGTQLEESSK

SEQ ID NO: 17694 - protein, 56 aa, Artificial Sequence
  Synthetic polypeptide
HGVVERALRSGGNRTPWNWLAIWSSYQMKKLIMVLKKTVTRKIRTWTKCLEPGLEN

SEQ ID NO: 17695 - protein, 28 aa, Artificial Sequence
  Synthetic polypeptide
SMGWWKELFGVGETVRPGIGLQYGAAIR

SEQ ID NO: 17696 - protein, 709 aa, Artificial Sequence
  Synthetic polypeptide
DVTHSSSTSIMIVRPPQPRGTAVHLAQASFQIEAFGSKFILDLILNNGLLSSDYVEIHYENGKPQYSKGGEHCYYHGSIRGVKDSKVALSTCNGLHGMFEDDTFVYMIEPLELVHDEKSTGRPHIIQKTLAGQYSKQMKNLTMERGDQWPFLSELQWLKRRKRAVNPSRGIFEEMKYLELMIVNDHKTYKKHRSSHAHTNNFAKSVVNLVDSIYKEQLNTRVVLVAVETWTEKDQIDITTNPVQMLHEFSKYRQRIKQHADAVHLISRVTFHYKRSSLSYFGGVCSRTRGVGVNEYGLPMAVAQVLSQSLAQNLGIQWEPSSRKPKCDCTESWGGCIMEETGVSHSRKFSKCSILEYRDFLQRGGGACLFNRPTKLFEPTECGNGYVEAGEECDCGFHVECYGLCCKKCSLSNGAHCSDGPCCNNTSCLFQPRGYECRDAVNECDITEYCTGDSGQCPPNLHKQDGYACNQNQGRCYNGECKTRDNQCQYIWGTKAAGSDKFCYEKLNTEGTEKGNCGKDGDRWIQCSKHDVFCGFLLCTNLTRAPRIGQLQGEIIPTSFYHQGRVIDCSGAHVVLDDDTDVGYVEDGTPCGPSMMCLDRKCLQIQALNMSSCPLDSKGKVCSGHGVCSNEATCICDFTWAGTDCSIRDPVRNLHPPKDEGPKEMSRREGSILLSKAPSESAALDGHRLALLDSGYDILAAVLLELLSL

SEQ ID NO: 17697 - protein, 709 aa, Artificial Sequence
  Synthetic polypeptide
DVTHSSSTSIMIVRPPQPRGTAVHLAQASFQIEAFGSKFILDLILNNGLLSSDYVEIHYENGKPQYSKGGEHCYYHGSIRGVKDSKVALSTCNGLHGMFEDDTFVYMIEPLELVHDEKSTGRPHIIQKTLAGQYSKQMKNLTMERGDQWPFLSELQWLKRRKRAVNPSRGIFEEMKYLELMIVNDHKTYKKHRSSHAHTNNFAKSVVNLVDSIYKEQLNTRVVLVAVETWTEKDQIDITTNPVQMLHEFSKYRQRIKQHADAVHLISRVTFHYKRSSLSYFGGVCSRTRGVGVNEYGLPMAVAQVLSQSLAQNLGIQWEPSSRKPKCDCTESWGGCIMEETGVSHSRKFSKCSILEYRDFLQRGGGACLFNRPTKLFEPTECGNGYVEAGEECDCGFHVECYGLCCKKCSLSNGAHCSDGPCCNNTSCLFQPRGYECRDAVNECDITEYCTGDSGQCPPNLHKQDGYACNQNQGRCYNGECKTRDNQCQYIWGTKAAGSDKFCYEKLNTEGTEKGNCGKDGDRWIQCSKHDVFCGFLLCTNLTRAPRIGQLQGEIIPTSFYHQGRVIDCSGAHVVLDDDTDVGYVEDGTPCGPSMMCLDRKCLQIQALNMSSCPLDSKGKVCSGHGVCSNEATCICDFTWAGTDCSIRDPVRNLHPPKDEGPKGPSATNLIIGSIAGAILVAAIVLGGTGWGFKNVKKRRFDPTQQGPI

SEQ ID NO: 17698 - protein, 709 aa, Artificial Sequence
  Synthetic polypeptide
DVTHSSSTSIMIVRPPQPRGTAVHLAQASFQIEAFGSKFILDLILNNGLLSSDYVEIHYENGKPQYSKGGEHCYYHGSIRGVKDSKVALSTCNGLHGMFEDDTFVYMIEPLELVHDEKSTGRPHIIQKTLAGQYSKQMKNLTMERGDQWPFLSELQWLKRRKRAVNPSRGIFEEMKYLELMIVNDHKTYKKHRSSHAHTNNFAKSVVNLVDSIYKEQLNTRVVLVAVETWTEKDQIDITTNPVQMLHEFSKYRQRIKQHADAVHLISRVTFHYKRSSLSYFGGVCSRTRGVGVNEYGLPMAVAQVLSQSLAQNLGIQWEPSSRKPKCDCTESWGGCIMEETGVSHSRKFSKCSILEYRDFLQRGGGACLFNRPTKLFEPTECGNGYVEAGEECDCGFHVECYGLCCKKCSLSNGAHCSDGPCCNNTSCLFQPRGYECRDAVNECDITEYCTGDSGQCPPNLHKQDGYACNQNQGRCYNGECKTRDNQCQYIWGTKAAGSDKFCYEKLNTEGTEKGNCGKDGDRWIQCSKHDVFCGFLLCTNLTRAPRIGQLQGEIIPTSFYHQGRVIDCSGAHVVLDDDTDVGYVEDGTPCGPSMMCLDRKCLQIQALNMSSCPLDSKGKVCSGHGVCSNEATCICDFTWAGTDCSIRDPVRNLHPPKDEGPKVNMATSRLIGAVAGTILALGVIFGGTGWGIENVKKRRFDPTQQGPI

SEQ ID NO: 17699 - protein, 31 aa, Artificial Sequence
  Synthetic polypeptide
GLPSHVELLSIWPRQASRLKPSAPNSFLTSY

SEQ ID NO: 17700 - protein, 50 aa, Artificial Sequence
  Synthetic polypeptide
GRVSLHKLSLSLPDAIHIRCDSLLLNFHHDCEASPATWNCCPSGPGKLPD

SEQ ID NO: 17701 - protein, 567 aa, Artificial Sequence
  Synthetic polypeptide
AADSHLQLPEHKQTFPNILKKGYLEIRKDHDSYWQSCYAELSPYNLYFYSLDSSGNQNLYATYQLSHFQSISVLGNLEARMVDTVLYDNTQLQLKAESPWEALDWGQKLWEVVHAAVPGYMGRQNELTISPGLGHHDDYTQNHSFQKKTSGLLPPSPVLDSSKQYQNILKSGTLYRLTVQNNWKAFTFVLSRAYLMAFQPGKLDEDPLLSYNVDVCLAVQMDNLDGCDSCFQVIFPQDVLRLRAETRQRAQEWMEALKIAANVARSSEQNLQVTLRNKPKDQMGGHELRKNKRQSVTTSFLSILTTLSLERGLTAQSFKCAGCQRSIGLSNGKAKVCNYSGWYYCSSCHVDDSFLIPARIVHNWDTSKYKVSKQAKEFLEYVYEEPLIDIQQENAMLYHHAEPLAAVLRLRQRLKSLRAYLFSCRAAVAEDLRRRIFPREYLLQQIHLYSLADLQQVIEGKLAPFLGKVIKFATSHVYSCSLCSQKGFICEICNNGEILYPFEDISTSRCESCGAVFHSECKEKSVPCPRCVRRELQKKQKSFWQRLNMDESLEEACTMFELSYQNT

SEQ ID NO: 17702 - protein, 523 aa, Artificial Sequence
  Synthetic polypeptide
AADSHLQLPEHKQTFPNILKKGYLEIRKDHDSYWQSCYAELSPYNLYFYSLDSSGNQNLYATYQLSHFQSISVLGNLEARMVDTVLYDNTQLQLKAESPWEALDWGQKLWEVVHAAVPGYMGRQNELTISPGLGHHDDYTQNHSFQKKTSGLLPPSPVLDSSKQYQNILKSGTLYRLTVQNNWKAFTFVLSRAYLMAFQPGKLDEDPLLSYNVDVCLAVQMDNLDGCDSCFQVIFPQDVLRLRAETRQRAQEWMEALKIAANVARSSEQNLQVTLRNKPKDQMGGHELRKNKRQSVTTSFLSILTTLSLERGLTAQSFKCAGCQRSIGLSNGKAKVCNYSGWYYCSSCHVDDSFLIPARIVHNWDTSKYKVSKQAKEFLEYVYEEPLIDIQQENAMLYHHAEPLAAVLRLRQRLKSLRAYLFSCRAAVAEDLRRRIFPREYLLQQIHLYSLADLQQVIEGKLAPFLGKVIKFATSHVYSCSLCSQKGFICEICNNGEILYPFEDISTSRFGDPYADLLQGYVA

SEQ ID NO: 17703 - protein, 478 aa, Artificial Sequence
  Synthetic polypeptide
AADSHLQLPEHKQTFPNILKKGYLEIRKDHDSYWQSCYAELSPYNLYFYSLDSSGNQNLYATYQLSHFQSISVLGNLEARMVDTVLYDNTQLQLKAESPWEALDWGQKLWEVVHAAVPGYMGRQNELTISPGLGHHDDYTQNHSFQKKTSGLLPPSPVLDSSKQYQNILKSGTLYRLTVQNNWKAFTFVLSRAYLMAFQPGKLDEDPLLSYNVDVCLAVQMDNLDGCDSCFQVIFPQDVLRLRAETRQRAQEWMEALKIAANVARSSEQNLQVTLRNKPKDQMGGHELRKNKRQSVTTSFLSILTTLSLERGLTAQSFKCAGCQRSIGLSNGKAKVCNYSGWYYCSSCHVDDSFLIPARIVHNWDTSKYKVSKQAKEFLEYVYEEPLIDIQQENAMLYHHAEPLAAVLRLRQRLKSLRAYLFSCRAAVAEDLRRRNDQQHALVMLNVFGEFSPENTSFNRSTCIHLPTCSRPRHYSQI

SEQ ID NO: 17704 - protein, 25 aa, Artificial Sequence
  Synthetic polypeptide
RQDLFLELQTRISNCLNTSRHSQTF

SEQ ID NO: 17705 - protein, 64 aa, Artificial Sequence
  Synthetic polypeptide
KNVKRETGLASQPTSFSRAGCFLPLNTGLQVLQFWNSDWLSLLFSLQMAIVEPCDCWILMAPLL

SEQ ID NO: 17706 - protein, 526 aa, Artificial Sequence
  Synthetic polypeptide
LLDSDGTITIEEQIVLVLKAKVQCELNITAQLQEGEGNCFPEWDGLICWPRGTVGKISAVPCPPYIYDFNHKGVAFRHCNPNGTWDFMHSLNKTWANYSDCLRFLQPDISIGKQEFFERLYVMYTVGYSISFGSLAVAILIIGYFRRLHCTRNYIHMHLFVSFMLRATSIFVKDRVVHAHIGVKELESLIMQDDPQNSIEATSVDKSQYIGCKIAVVMFIYFLATNYYWILVEGLYLHNLIFVAFFSDTKYLWGFILIGWGFPAAFVAAWAVARATLADARCWELSAGDIKWIYQAPILAAIGLNFILFLNTVRVLATKIWETNAVGHDTRKQYRKLAKSTLVLVLVFGVHYIVFVCLPHSFTGLGWEIRMHCELFFNSFQGFFVSIIYCYCNGEVQAEVKKMWSRWNLSVDWKRTPPCGSRRCGSVLTTVTHSTSSQSQVAASTRMVLISGKAAKIASRQPDSHITLPGYVWSNSEQDCLPHSFHEETKEDSGRQGDDILMEKPSRPMESNPDTEGCQGETEDVL

SEQ ID NO: 17707 - protein, 33 aa, Artificial Sequence
  Synthetic polypeptide
TLDSKFFSFGTQTGSPCSSACRWLLWNLVIAGF

SEQ ID NO: 17708 - protein, 1 aa, Artificial Sequence
  Synthetic polypeptide
G

SEQ ID NO: 17709 - protein, 26 aa, Artificial Sequence
  Synthetic polypeptide
KYKISQVWWCVPIIPSPREAEANSPK

SEQ ID NO: 17710 - protein, 68 aa, Artificial Sequence
  Synthetic polypeptide
SHPLARLRLIHLNKIDPHAPNEMLYGRIGYIYALLFVNKNFGVEKIPQSHIQQICETILTSGENLARK

SEQ ID NO: 17711 - protein, 271 aa, Artificial Sequence
  Synthetic polypeptide
SHPLARLRLIHLNKIDPHAPNEMLYGRIGYIYALLFVNKNFGVEKIPQSHIQQICETILTSGENLARKRNFTAKSPLMYEWYQEYYVGAAHGLAGIYYYLMQPSLQVSQGKLHSLVKPSVDYVCQLKFPSGNYPPCIGDNRDLLVHWCHGAPGVIYMLIQAYKVFREEKYLCDAYQCADVIWQYGLLKKGYGLCHGSAGNAYAFLTLYNLTQDMKYLYRACKFAEWCLEYGEHGCRTPDTPFSLFEGMAGTIYFLADLLVPTKARFPAFEL

SEQ ID NO: 17712 - protein, 11 aa, Artificial Sequence
  Synthetic polypeptide
KYKISQANSPK

SEQ ID NO: 17713 - protein, 2 aa, Artificial Sequence
  Synthetic polypeptide
PG

SEQ ID NO: 17714 - protein, 76 aa, Artificial Sequence
  Synthetic polypeptide
PTWRNPVSTKNTKLARLIHLNKIDPHAPNEMLYGRIGYIYALLFVNKNFGVEKIPQSHIQQICETILTSGENLARK

SEQ ID NO: 17715 - protein, 279 aa, Artificial Sequence
  Synthetic polypeptide
PTWRNPVSTKNTKLARLIHLNKIDPHAPNEMLYGRIGYIYALLFVNKNFGVEKIPQSHIQQICETILTSGENLARKRNFTAKSPLMYEWYQEYYVGAAHGLAGIYYYLMQPSLQVSQGKLHSLVKPSVDYVCQLKFPSGNYPPCIGDNRDLLVHWCHGAPGVIYMLIQAYKVFREEKYLCDAYQCADVIWQYGLLKKGYGLCHGSAGNAYAFLTLYNLTQDMKYLYRACKFAEWCLEYGEHGCRTPDTPFSLFEGMAGTIYFLADLLVPTKARFPAFEL

SEQ ID NO: 17716 - protein, 176 aa, Artificial Sequence
  Synthetic polypeptide
NGPNMYQLTPEFSQRLTNKIRELLQQMERGLKSADPRDGTGYTGWAGIAVLYLHLYDVFGDPAYLQLAHGYVKQSLNCLTKRSITFLCGDAGPLAVAAVLYHKMNNEKQAEDCITRLIHLNKIDPHAPNEMLYGRIGYIYALLFVNKNFGVEKIPQSHIQQICETILTSGENLARK

SEQ ID NO: 17717 - protein, 379 aa, Artificial Sequence
  Synthetic polypeptide
NGPNMYQLTPEFSQRLTNKIRELLQQMERGLKSADPRDGTGYTGWAGIAVLYLHLYDVFGDPAYLQLAHGYVKQSLNCLTKRSITFLCGDAGPLAVAAVLYHKMNNEKQAEDCITRLIHLNKIDPHAPNEMLYGRIGYIYALLFVNKNFGVEKIPQSHIQQICETILTSGENLARKRNFTAKSPLMYEWYQEYYVGAAHGLAGIYYYLMQPSLQVSQGKLHSLVKPSVDYVCQLKFPSGNYPPCIGDNRDLLVHWCHGAPGVIYMLIQAYKVFREEKYLCDAYQCADVIWQYGLLKKGYGLCHGSAGNAYAFLTLYNLTQDMKYLYRACKFAEWCLEYGEHGCRTPDTPFSLFEGMAGTIYFLADLLVPTKARFPAFEL

SEQ ID NO: 17718 - protein, 62 aa, Artificial Sequence
  Synthetic polypeptide
NGPNMYQLTPEFSQRLTNKIRELLQQMERGLKSADPRDGTGYTGWAVGRIGKSSKIQCLKRR

SEQ ID NO: 17719 - protein, 10 aa, Artificial Sequence
  Synthetic polypeptide
SNRMGLICTS

SEQ ID NO: 17720 - protein, 6 aa, Artificial Sequence
  Synthetic polypeptide
YVPADS

SEQ ID NO: 17721 - protein, 11 aa, Artificial Sequence
  Synthetic polypeptide
NNDKDGVCRTM

SEQ ID NO: 17722 - protein, 525 aa, Artificial Sequence
  Synthetic polypeptide
TMTRTVCAEQCDGRCYGPYVSDCCHRECAGGCSGPKDTDCFACMNFNDSGACVTQCPQTFVYNPTTFQLEHNFNAKYTYGAFCVKKCPHNFVVDSSSCVRACPSSKMEVEENGIKMCKPCTDICPKACDGIGTGSLMSAQTVDSSNIDKFINCTKINGNLIFLVTGIHGDPYNAIEAIDPEKLNVFRTVREITGFLNIQSWPPNMTDFSVFSNLVTIGGRVLYSGLSLLILKQQGITSLQFQSLKEISAGNIYITDNSNLCYYHTINWTTLFSTINQRIVIRDNRKAENCTAEGMVCNHLCSSDGCWGPGPDQCLSCRRFSRGRICIESCNLYDGEFREFENGSICVECDPQCEKMEDGLLTCHGPGPDNCTKCSHFKDGPNCVEKCPDGLQGANSFIFKYADPDRECHPCHPNCTQGCIGSSIEDCIGLMDRTPLIAAGVIGGLFILVIVGLTFAVYVRRKSIKKKRALRRFLETELVEPLTPSGTAPNQAQLRILKETELKRVKVLGSGAFGTVYKGIWVPEG

SEQ ID NO: 17723 - protein, 1092 aa, Artificial Sequence
  Synthetic polypeptide
TMTRTVCAEQCDGRCYGPYVSDCCHRECAGGCSGPKDTDCFACMNFNDSGACVTQCPQTFVYNPTTFQLEHNFNAKYTYGAFCVKKCPHNFVVDSSSCVRACPSSKMEVEENGIKMCKPCTDICPKACDGIGTGSLMSAQTVDSSNIDKFINCTKINGNLIFLVTGIHGDPYNAIEAIDPEKLNVFRTVREITGFLNIQSWPPNMTDFSVFSNLVTIGGRVLYSGLSLLILKQQGITSLQFQSLKEISAGNIYITDNSNLCYYHTINWTTLFSTINQRIVIRDNRKAENCTAEGMVCNHLCSSDGCWGPGPDQCLSCRRFSRGRICIESCNLYDGEFREFENGSICVECDPQCEKMEDGLLTCHGPGPDNCTKCSHFKDGPNCVEKCPDGLQGANSFIFKYADPDRECHPCHPNCTQGCIGSSIEDCIGLMDRTPLIAAGVIGGLFILVIVGLTFAVYVRRKSIKKKRALRRFLETELVEPLTPSGTAPNQAQLRILKETELKRVKVLGSGAFGTVYKGIWVPEGETVKIPVAIKILNETTGPKANVEFMDEALIMASMDHPHLVRLLGVCLSPTIQLVTQLMPHGCLLEYVHEHKDNIGSQLLLNWCVQIAKGMMYLEERRLVHRDLAARNVLVKSPNHVKITDFGLARLLEGDEKEYNADGGKMPIKWMALECIHYRKFTHQSDVWSYGVTIWELMTFGGKPYDGIPTREIPDLLEKGERLPQPPICTIDVYMVMVKCWMIDADSRPKFKELAAEFSRMARDPQRYLVIQGDDRMKLPSPNDSKFFQNLLDEEDLEDMMDAEEYLVPQAFNIPPPIYTSRARIDSNRSEIGHSPPPAYTPMSGNQFVYRDGGFAAEQGVSVPYRAPTSTIPEAPVAQGATAEIFDDSCCNGTLRKPVAPHVQEDSSTQRYSADPTVFAPERSPRGELDEEGYMTPMRDKPKQEYLNPVEENPFVSRRKNGDLQALDNPEYHNASNGPPKAEDEYVNEPLYLNTFANTLGKAEYLKNNILSMPEKAKKAFDNPDYWNHSLPPRSTLQHPDYLQEYSTKYFYKQNGRIRPIVAENPEYLSEFSLKPGTVLPPPPYRHRNTVV

SEQ ID NO: 17724 - protein, 1086 aa, Artificial Sequence
  Synthetic polypeptide
TMTRTVCAEQCDGRCYGPYVSDCCHRECAGGCSGPKDTDCFACMNFNDSGACVTQCPQTFVYNPTTFQLEHNFNAKYTYGAFCVKKCPHNFVVDSSSCVRACPSSKMEVEENGIKMCKPCTDICPKACDGIGTGSLMSAQTVDSSNIDKFINCTKINGNLIFLVTGIHGDPYNAIEAIDPEKLNVFRTVREITGFLNIQSWPPNMTDFSVFSNLVTIGGRVLYSGLSLLILKQQGITSLQFQSLKEISAGNIYITDNSNLCYYHTINWTTLFSTINQRIVIRDNRKAENCTAEGMVCNHLCSSDGCWGPGPDQCLSCRRFSRGRICIESCNLYDGEFREFENGSICVECDPQCEKMEDGLLTCHGPGPDNCTKCSHFKDGPNCVEKCPDGLQGANSFIFKYADPDRECHPCHPNCTQGCNGPTSHDCIYYPWTGHSTLPQHARTPLIAAGVIGGLFILVIVGLTFAVYVRRKSIKKKRALRRFLETELVEPLTPSGTAPNQAQLRILKETELKRVKVLGSGAFGTVYKGIWVPEGETVKIPVAIKILNETTGPKANVEFMDEALIMASMDHPHLVRLLGVCLSPTIQLVTQLMPHGCLLEYVHEHKDNIGSQLLLNWCVQIAKGMMYLEERRLVHRDLAARNVLVKSPNHVKITDFGLARLLEGDEKEYNADGGKMPIKWMALECIHYRKFTHQSDVWSYGVTIWELMTFGGKPYDGIPTREIPDLLEKGERLPQPPICTIDVYMVMVKCWMIDADSRPKFKELAAEFSRMARDPQRYLVIQGDDRMKLPSPNDSKFFQNLLDEEDLEDMMDAEEYLVPQAFNIPPPIYTSRARIDSNRNQFVYRDGGFAAEQGVSVPYRAPTSTIPEAPVAQGATAEIFDDSCCNGTLRKPVAPHVQEDSSTQRYSADPTVFAPERSPRGELDEEGYMTPMRDKPKQEYLNPVEENPFVSRRKNGDLQALDNPEYHNASNGPPKAEDEYVNEPLYLNTFANTLGKAEYLKNNILSMPEKAKKAFDNPDYWNHSLPPRSTLQHPDYLQEYSTKYFYKQNGRIRPIVAENPEYLSEFSLKPGTVLPPPPYRHRNTVV

SEQ ID NO: 17725 - protein, 1102 aa, Artificial Sequence
  Synthetic polypeptide
TMTRTVCAEQCDGRCYGPYVSDCCHRECAGGCSGPKDTDCFACMNFNDSGACVTQCPQTFVYNPTTFQLEHNFNAKYTYGAFCVKKCPHNFVVDSSSCVRACPSSKMEVEENGIKMCKPCTDICPKACDGIGTGSLMSAQTVDSSNIDKFINCTKINGNLIFLVTGIHGDPYNAIEAIDPEKLNVFRTVREITGFLNIQSWPPNMTDFSVFSNLVTIGGRVLYSGLSLLILKQQGITSLQFQSLKEISAGNIYITDNSNLCYYHTINWTTLFSTINQRIVIRDNRKAENCTAEGMVCNHLCSSDGCWGPGPDQCLSCRRFSRGRICIESCNLYDGEFREFENGSICVECDPQCEKMEDGLLTCHGPGPDNCTKCSHFKDGPNCVEKCPDGLQGANSFIFKYADPDRECHPCHPNCTQGCNGPTSHDCIYYPWTGHSTLPQHARTPLIAAGVIGGLFILVIVGLTFAVYVRRKSIKKKRALRRFLETELVEPLTPSGTAPNQAQLRILKETELKRVKVLGSGAFGTVYKGIWVPEGETVKIPVAIKILNETTGPKANVEFMDEALIMASMDHPHLVRLLGVCLSPTIQLVTQLMPHGCLLEYVHEHKDNIGSQLLLNWCVQIAKGMMYLEERRLVHRDLAARNVLVKSPNHVKITDFGLARLLEGDEKEYNADGGKMPIKWMALECIHYRKFTHQSDVWSYGVTIWELMTFGGKPYDGIPTREIPDLLEKGERLPQPPICTIDVYMVMVKCWMIDADSRPKFKELAAEFSRMARDPQRYLVIQGDDRMKLPSPNDSKFFQNLLDEEDLEDMMDAEEYLVPQAFNIPPPIYTSRARIDSNRSEIGHSPPPAYTPMSGNQFVYRDGGFAAEQGVSVPYRAPTSTIPEAPVAQGATAEIFDDSCCNGTLRKPVAPHVQEDSSTQRYSADPTVFAPERSPRGELDEEGYMTPMRDKPKQEYLNPVEENPFVSRRKNGDLQALDNPEYHNASNGPPKAEDEYVNEPLYLNTFANTLGKAEYLKNNILSMPEKAKKAFDNPDYWNHSLPPRSTLQHPDYLQEYSTKYFYKQNGRIRPIVAENPEYLSEFSLKPGTVLPPPPYRHRNTVV

SEQ ID NO: 17726 - protein, 17 aa, Artificial Sequence
  Synthetic polypeptide
AMWNFCSRSHRLRVSGS

SEQ ID NO: 17727 - protein, 19 aa, Artificial Sequence
  Synthetic polypeptide
FWGLLSHVELLFEKSQATC

SEQ ID NO: 17728 - protein, 148 aa, Artificial Sequence
  Synthetic polypeptide
WVYQGFLLLFPPHLLLLLPCKKCLSPPAMILGPPKPCGTSVREVTGYVLVALNQFRYLPLENLRIIRGTKLYEDRYALAIFLNYRKDGNFGLQELGLKNLTEILNGGVYVDQNKFLCYADTIHWQDIVRNPWPSNLTLVSTNGSSGCG

SEQ ID NO: 17729 - protein, 692 aa, Artificial Sequence
  Synthetic polypeptide
WVYQGFLLLFPPHLLLLLPCKKCLSPPAMILGPPKPCGTSVREVTGYVLVALNQFRYLPLENLRIIRGTKLYEDRYALAIFLNYRKDGNFGLQELGLKNLTEILNGGVYVDQNKFLCYADTIHWQDIVRNPWPSNLTLVSTNGSSGCGRCHKSCTGRCWGPTENHCQTLTRTVCAEQCDGRCYGPYVSDCCHRECAGGCSGPKDTDCFACMNFNDSGACVTQCPQTFVYNPTTFQLEHNFNAKYTYGAFCVKKCPHNFVVDSSSCVRACPSSKMEVEENGIKMCKPCTDICPKACDGIGTGSLMSAQTVDSSNIDKFINCTKINGNLIFLVTGIHGDPYNAIEAIDPEKLNVFRTVREITGFLNIQSWPPNMTDFSVFSNLVTIGGRVLYSGLSLLILKQQGITSLQFQSLKEISAGNIYITDNSNLCYYHTINWTTLFSTINQRIVIRDNRKAENCTAEGMVCNHLCSSDGCWGPGPDQCLSCRRFSRGRICIESCNLYDGEFREFENGSICVECDPQCEKMEDGLLTCHGPGPDNCTKCSHFKDGPNCVEKCPDGLQGANSFIFKYADPDRECHPCHPNCTQGCIGSSIEDCIGLMDRTPLIAAGVIGGLFILVIVGLTFAVYVRRKSIKKKRALRRFLETELVEPLTPSGTAPNQAQLRILKETELKRVKVLGSGAFGTVYKGIWVPEG

SEQ ID NO: 17730 - protein, 1259 aa, Artificial Sequence
  Synthetic polypeptide
WVYQGFLLLFPPHLLLLLPCKKCLSPPAMILGPPKPCGTSVREVTGYVLVALNQFRYLPLENLRIIRGTKLYEDRYALAIFLNYRKDGNFGLQELGLKNLTEILNGGVYVDQNKFLCYADTIHWQDIVRNPWPSNLTLVSTNGSSGCGRCHKSCTGRCWGPTENHCQTLTRTVCAEQCDGRCYGPYVSDCCHRECAGGCSGPKDTDCFACMNFNDSGACVTQCPQTFVYNPTTFQLEHNFNAKYTYGAFCVKKCPHNFVVDSSSCVRACPSSKMEVEENGIKMCKPCTDICPKACDGIGTGSLMSAQTVDSSNIDKFINCTKINGNLIFLVTGIHGDPYNAIEAIDPEKLNVFRTVREITGFLNIQSWPPNMTDFSVFSNLVTIGGRVLYSGLSLLILKQQGITSLQFQSLKEISAGNIYITDNSNLCYYHTINWTTLFSTINQRIVIRDNRKAENCTAEGMVCNHLCSSDGCWGPGPDQCLSCRRFSRGRICIESCNLYDGEFREFENGSICVECDPQCEKMEDGLLTCHGPGPDNCTKCSHFKDGPNCVEKCPDGLQGANSFIFKYADPDRECHPCHPNCTQGCIGSSIEDCIGLMDRTPLIAAGVIGGLFILVIVGLTFAVYVRRKSIKKKRALRRFLETELVEPLTPSGTAPNQAQLRILKETELKRVKVLGSGAFGTVYKGIWVPEGETVKIPVAIKILNETTGPKANVEFMDEALIMASMDHPHLVRLLGVCLSPTIQLVTQLMPHGCLLEYVHEHKDNIGSQLLLNWCVQIAKGMMYLEERRLVHRDLAARNVLVKSPNHVKITDFGLARLLEGDEKEYNADGGKMPIKWMALECIHYRKFTHQSDVWSYGVTIWELMTFGGKPYDGIPTREIPDLLEKGERLPQPPICTIDVYMVMVKCWMIDADSRPKFKELAAEFSRMARDPQRYLVIQGDDRMKLPSPNDSKFFQNLLDEEDLEDMMDAEEYLVPQAFNIPPPIYTSRARIDSNRSEIGHSPPPAYTPMSGNQFVYRDGGFAAEQGVSVPYRAPTSTIPEAPVAQGATAEIFDDSCCNGTLRKPVAPHVQEDSSTQRYSADPTVFAPERSPRGELDEEGYMTPMRDKPKQEYLNPVEENPFVSRRKNGDLQALDNPEYHNASNGPPKAEDEYVNEPLYLNTFANTLGKAEYLKNNILSMPEKAKKAFDNPDYWNHSLPPRSTLQHPDYLQEYSTKYFYKQNGRIRPIVAENPEYLSEFSLKPGTVLPPPPYRHRNTVV

SEQ ID NO: 17731 - protein, 1253 aa, Artificial Sequence
  Synthetic polypeptide
WVYQGFLLLFPPHLLLLLPCKKCLSPPAMILGPPKPCGTSVREVTGYVLVALNQFRYLPLENLRIIRGTKLYEDRYALAIFLNYRKDGNFGLQELGLKNLTEILNGGVYVDQNKFLCYADTIHWQDIVRNPWPSNLTLVSTNGSSGCGRCHKSCTGRCWGPTENHCQTLTRTVCAEQCDGRCYGPYVSDCCHRECAGGCSGPKDTDCFACMNFNDSGACVTQCPQTFVYNPTTFQLEHNFNAKYTYGAFCVKKCPHNFVVDSSSCVRACPSSKMEVEENGIKMCKPCTDICPKACDGIGTGSLMSAQTVDSSNIDKFINCTKINGNLIFLVTGIHGDPYNAIEAIDPEKLNVFRTVREITGFLNIQSWPPNMTDFSVFSNLVTIGGRVLYSGLSLLILKQQGITSLQFQSLKEISAGNIYITDNSNLCYYHTINWTTLFSTINQRIVIRDNRKAENCTAEGMVCNHLCSSDGCWGPGPDQCLSCRRFSRGRICIESCNLYDGEFREFENGSICVECDPQCEKMEDGLLTCHGPGPDNCTKCSHFKDGPNCVEKCPDGLQGANSFIFKYADPDRECHPCHPNCTQGCNGPTSHDCIYYPWTGHSTLPQHARTPLIAAGVIGGLFILVIVGLTFAVYVRRKSIKKKRALRRFLETELVEPLTPSGTAPNQAQLRILKETELKRVKVLGSGAFGTVYKGIWVPEGETVKIPVAIKILNETTGPKANVEFMDEALIMASMDHPHLVRLLGVCLSPTIQLVTQLMPHGCLLEYVHEHKDNIGSQLLLNWCVQIAKGMMYLEERRLVHRDLAARNVLVKSPNHVKITDFGLARLLEGDEKEYNADGGKMPIKWMALECIHYRKFTHQSDVWSYGVTIWELMTFGGKPYDGIPTREIPDLLEKGERLPQPPICTIDVYMVMVKCWMIDADSRPKFKELAAEFSRMARDPQRYLVIQGDDRMKLPSPNDSKFFQNLLDEEDLEDMMDAEEYLVPQAFNIPPPIYTSRARIDSNRNQFVYRDGGFAAEQGVSVPYRAPTSTIPEAPVAQGATAEIFDDSCCNGTLRKPVAPHVQEDSSTQRYSADPTVFAPERSPRGELDEEGYMTPMRDKPKQEYLNPVEENPFVSRRKNGDLQALDNPEYHNASNGPPKAEDEYVNEPLYLNTFANTLGKAEYLKNNILSMPEKAKKAFDNPDYWNHSLPPRSTLQHPDYLQEYSTKYFYKQNGRIRPIVAENPEYLSEFSLKPGTVLPPPPYRHRNTVV

SEQ ID NO: 17732 - protein, 1269 aa, Artificial Sequence
  Synthetic polypeptide
WVYQGFLLLFPPHLLLLLPCKKCLSPPAMILGPPKPCGTSVREVTGYVLVALNQFRYLPLENLRIIRGTKLYEDRYALAIFLNYRKDGNFGLQELGLKNLTEILNGGVYVDQNKFLCYADTIHWQDIVRNPWPSNLTLVSTNGSSGCGRCHKSCTGRCWGPTENHCQTLTRTVCAEQCDGRCYGPYVSDCCHRECAGGCSGPKDTDCFACMNFNDSGACVTQCPQTFVYNPTTFQLEHNFNAKYTYGAFCVKKCPHNFVVDSSSCVRACPSSKMEVEENGIKMCKPCTDICPKACDGIGTGSLMSAQTVDSSNIDKFINCTKINGNLIFLVTGIHGDPYNAIEAIDPEKLNVFRTVREITGFLNIQSWPPNMTDFSVFSNLVTIGGRVLYSGLSLLILKQQGITSLQFQSLKEISAGNIYITDNSNLCYYHTINWTTLFSTINQRIVIRDNRKAENCTAEGMVCNHLCSSDGCWGPGPDQCLSCRRFSRGRICIESCNLYDGEFREFENGSICVECDPQCEKMEDGLLTCHGPGPDNCTKCSHFKDGPNCVEKCPDGLQGANSFIFKYADPDRECHPCHPNCTQGCNGPTSHDCIYYPWTGHSTLPQHARTPLIAAGVIGGLFILVIVGLTFAVYVRRKSIKKKRALRRFLETELVEPLTPSGTAPNQAQLRILKETELKRVKVLGSGAFGTVYKGIWVPEGETVKIPVAIKILNETTGPKANVEFMDEALIMASMDHPHLVRLLGVCLSPTIQLVTQLMPHGCLLEYVHEHKDNIGSQLLLNWCVQIAKGMMYLEERRLVHRDLAARNVLVKSPNHVKITDFGLARLLEGDEKEYNADGGKMPIKWMALECIHYRKFTHQSDVWSYGVTIWELMTFGGKPYDGIPTREIPDLLEKGERLPQPPICTIDVYMVMVKCWMIDADSRPKFKELAAEFSRMARDPQRYLVIQGDDRMKLPSPNDSKFFQNLLDEEDLEDMMDAEEYLVPQAFNIPPPIYTSRARIDSNRSEIGHSPPPAYTPMSGNQFVYRDGGFAAEQGVSVPYRAPTSTIPEAPVAQGATAEIFDDSCCNGTLRKPVAPHVQEDSSTQRYSADPTVFAPERSPRGELDEEGYMTPMRDKPKQEYLNPVEENPFVSRRKNGDLQALDNPEYHNASNGPPKAEDEYVNEPLYLNTFANTLGKAEYLKNNILSMPEKAKKAFDNPDYWNHSLPPRSTLQHPDYLQEYSTKYFYKQNGRIRPIVAENPEYLSEFSLKPGTVLPPPPYRHRNTVV

SEQ ID NO: 17733 - protein, 55 aa, Artificial Sequence
  Synthetic polypeptide
GGPIWGREEHNFAPAVSLLRHQLWLHPNRWAGHFTGDPGLSPVSHWSCAPRHCPL

SEQ ID NO: 17734 - protein, 41 aa, Artificial Sequence
  Synthetic polypeptide
SQHFGRLRWPDHLRWAHLGQGRAQFCACCFASTTSALAASE

SEQ ID NO: 17735 - protein, 227 aa, Artificial Sequence
  Synthetic polypeptide
VARSPKVGPSGAGKSTILRLLFRFYDISSGCIRIDGQDISQVTQASLRSHIGVVPQDTVLFNDTIADNIRYGRVTAGNDEVEAAAQAAGIHDAIMAFPEGYRTQVGERGLKLSGGEKQRVAIARTILKAPGIILLDEATSALDTSNERAIQASLAKVCANRTTIVVAHRLSTVVNADQILVIKDGCIVERGRHEALLSRGGVYADMWQLQQGQEETSEDTKPQTMER

SEQ ID NO: 17736 - protein, 177 aa, Artificial Sequence
  Synthetic polypeptide
ACKIGYYKALSTDATCAKCPPHSYSVWEGATSCTCDRGFFRADNDAASMPCTRPPSAPLNLISNVNETSVNLEWSSPQNTGGRQDISYNVVCKKCGAGDPSKCRPCGSGVHYTPQQNGLKTTKVSITDLLAHTNYTFEIWAVNGVSKYNPNPDQSVSVTVTTNQAAPSSIALVQAKE

SEQ ID NO: 17737 - protein, 675 aa, Artificial Sequence
  Synthetic polypeptide
ACKIGYYKALSTDATCAKCPPHSYSVWEGATSCTCDRGFFRADNDAASMPCTRPPSAPLNLISNVNETSVNLEWSSPQNTGGRQDISYNVVCKKCGAGDPSKCRPCGSGVHYTPQQNGLKTTKVSITDLLAHTNYTFEIWAVNGVSKYNPNPDQSVSVTVTTNQAAPSSIALVQAKEVTRYSVALAWLEPDRPNGVILEYEVKYYEKDQNERSYRIVRTAARNTDIKGLNPLTSYVFHVRARTAAGYGDFSEPLEVTTNTVPSRIIGDGANSTVLLVSVSGSVVLVVILIAAFVISRRRSKYSKAKQEADEEKHLNQGVRTYVDPFTYEDPNQAVREFAKEIDASCIKIEKVIGVGEFGEVCSGRLKVPGKREICVAIKTLKAGYTDKQRRDFLSEASIMGQFDHPNIIHLEGVVTKCKPVMIITEYMENGSLDAFLRKNDGRFTVIQLVGMLRGIGSGMKYLSDMSYVHRDLAARNILVNSNLVCKVSDFGMSRVLEDDPEAAYTTRGGKIPIRWTAPEAIAYRKFTSASDVWSYGIVMWEVMSYGERPYWDMSNQDVIKAIEEGYRLPPPMDCPIALHQLMLDCWQKERSDRPKFGQIVNMLDKLIRNPNSLKRTGTESSRPNTALLDPSSPEFSAVVSVGDWLQAIKMDRYKDNFTAAGYTTLEAVVHVNQE

SEQ ID NO: 17738 - protein, 712 aa, Artificial Sequence
  Synthetic polypeptide
ACKIGYYKALSTDATCAKCPPHSYSVWEGATSCTCDRGFFRADNDAASMPCTRPPSAPLNLISNVNETSVNLEWSSPQNTGGRQDISYNVVCKKCGAGDPSKCRPCGSGVHYTPQQNGLKTTKVSITDLLAHTNYTFEIWAVNGVSKYNPNPDQSVSVTVTTNQAAPSSIALVQAKEVTRYSVALAWLEPDRPNGVILEYEVKYYEKDQNERSYRIVRTAARNTDIKGLNPLTSYVFHVRARTAAGYGDFSEPLEVTTNTVPSRIIGDGANSTVLLVSVSGSVVLVVILIAAFVISRRRSKYSKAKQEADEEKHLNQGVRTYVDPFTYEDPNQAVREFAKEIDASCIKIEKVIGVGEFGEVCSGRLKVPGKREICVAIKTLKAGYTDKQRRDFLSEASIMGQFDHPNIIHLEGVVTKCKPVMIITEYMENGSLDAFLRKNDGRFTVIQLVGMLRGIGSGMKYLSDMSYVHRDLAARNILVNSNLVCKVSDFGMSRVLEDDPEAAYTTRGGKIPIRWTAPEAIAYRKFTSASDVWSYGIVMWEVMSYGERPYWDMSNQDVIKAIEEGYRLPPPMDCPIALHQLMLDCWQKERSDRPKFGQIVNMLDKLIRNPNSLKRTGTESSRPNTALLDPSSPEFSAVVSVGDWLQAIKMDRYKDNFTAAGYTTLEAVVHVNQEDLARIGITAITHQNKILSSVQAMRTQMQQMHGRMVPV

SEQ ID NO: 17739 - protein, 40 aa, Artificial Sequence
  Synthetic polypeptide
NSSLLSLQNWILQGSLHGCHLCQVPTPQLLCLGRSHLVHL

SEQ ID NO: 17740 - protein, 78 aa, Artificial Sequence
  Synthetic polypeptide
QMYGLVPSINCSKLKFLTSKLAKLDITRLSPRMPPVPSAHPTATLSGKEPPRAPVTEAFSELTTMLPLCPAPVHHLLP

SEQ ID NO: 17741 - protein, 58 aa, Artificial Sequence
  Synthetic polypeptide
FITRFDGFIMVLLSSHSSLSCQHVKKDMFAYSSSMIVSFLRPPSPVELLYWRALPVQD

SEQ ID NO: 17742 - protein, 362 aa, Artificial Sequence
  Synthetic polypeptide
GPPALWNCYTGELCQSKIDYCILDPCRNGATCISSLSGFTCQCPEGYFGSACEEKVDPCASSPCQNNGTCYVDGVHFTCNCSPGFTGPTCAQLIDFCALSPCAHGTCRSVGTSYKCLCDPGYHGLYCEEEYNECLSAPCLNAATCRDLVNGYECVCLAEYKGTHCELYKDPCANVSCLNGATCDSDGLNGTCICAPGFTGEECDIDINECDSNPCHHGGSCLDQPNGYNCHCPHGWVGANCEIHLQWKSGHMAESLTNMPRHSLYIIIGALCVAFILMLIILIVGICRISRIEYQGSSRPAYEEFYNCRSIDSEFSNAIASIRHARFGKKSRPAMYDVSPIAYEDYSPDDKPLVTLIKTKDL

SEQ ID NO: 17743 - protein, 57 aa, Artificial Sequence
  Synthetic polypeptide
WFYNGFAQFSFFSFLPACKEGHVCLLFLHDCKFLEAPQPCGTVILESFASPRLITAS

SEQ ID NO: 17744 - protein, 12 aa, Artificial Sequence
  Synthetic polypeptide
HGLDRQPAEVEC

SEQ ID NO: 17745 - protein, 59 aa, Artificial Sequence
  Synthetic polypeptide
RAQWLMPVIPALWKAEGGGSRGQEIKTILADTGWTDNRLKWNAEEFGNISVLRLPPDMQ

SEQ ID NO: 17746 - protein, 186 aa, Artificial Sequence
  Synthetic polypeptide
RAQWLMPVIPALWKAEGGGSRGQEIKTILADTGWTDNRLKWNAEEFGNISVLRLPPDMVWLPEIVLENNNDGSFQISYSCNVLVYHYGFVYWLPPAIFRSSCPISVTYFPFDWQNCSLKFRERGVGDSPPAGQGQRGPQSPSGQPQPPGHHLLPHHPPQAPLLHHQHPGALRAHLLHGQPGLLPTG

SEQ ID NO: 17747 - protein, 122 aa, Artificial Sequence
  Synthetic polypeptide
RAQWLMPVIPALWKAEGGGSRGQEIKTILADTGWTDNRLKWNAEEFGNISVLRLPPDMVWLPEIVLENNNDGSFQISYSCNVLVYHYGFVYWLPPAIFRSSCPISVTYFPFDWQNCSLKFRW

SEQ ID NO: 17748 - protein, 138 aa, Artificial Sequence
  Synthetic polypeptide
RAQWLMPVIPALWKAEGGGSRGQEIKTILADTGWTDNRLKWNAEEFGNISVLRLPPDMVWLPEIVLENNNDGSFQISYSCNVLVYHYGFVYWLPPAIFRSSCPISVTYFPFDWQNCSLKFSSLKYTAKEITLSLKQDA

SEQ ID NO: 17749 - protein, 468 aa, Artificial Sequence
  Synthetic polypeptide
RAQWLMPVIPALWKAEGGGSRGQEIKTILADTGWTDNRLKWNAEEFGNISVLRLPPDMVWLPEIVLENNNDGSFQISYSCNVLVYHYGFVYWLPPAIFRSSCPISVTYFPFDWQNCSLKFSSLKYTAKEITLSLKQDAKENRTYPVEWIIIDPEGFTENGEWEIVHRPARVNVDPRAPLDSPSRQDITFYLIIRRKPLFYIINILVPCVLISFMVNLVFYLPADSGEKTSVAISVLLAQSVFLLLISKRLPATSMAIPLIGKFLLFGMVLVTMVVVICVIVLNIHFRTPSTHVLSEGVKKLFLETLPELLHMSRPAEDGPSPGALVRRSSSLGYISKAEEYFLLKSRSDLMFEKQSERHGLARRLTTARRPPASSEQAQQELFNELKPAVDGANFIVNHMRDQNNYNEEKDSWNRVARTVDRLCLFVVTPVMVVGTAWIFLQGVYNQPPPQPFPGDPYSYNVQDKRFI

SEQ ID NO: 17750 - protein, 30 aa, Artificial Sequence
  Synthetic polypeptide
SQHFGRPRGVDHEVRRSRPSWLTRAGQTTG

SEQ ID NO: 17751 - protein, 119 aa, Artificial Sequence
  Synthetic polypeptide
KERDHVLCRNMDGAGESVVSPPELPPRNIPLTASSCEAKEVPFSNENPRATETSRPSLSETLFQRLQSMDTSGLPEEHLKAIQDYLSTQLAQDSEFVKTGSSSLPHLKKLTTLLCKELY

SEQ ID NO: 17752 - protein, 1075 aa, Artificial Sequence
  Synthetic polypeptide
KERDHVLCRNMDGAGESVVSPPELPPRNIPLTASSCEAKEVPFSNENPRATETSRPSLSETLFQRLQSMDTSGLPEEHLKAIQDYLSTQLAQDSEFVKTGSSSLPHLKKLTTLLCKELYGQMLRTVPGIGKVKEEDHVPGEANPINMVSKLSQLTSLLSSIEDKVKALLHEGPESPHRPSLIPPVTFEVKAESLGIPQKMQLKVDVESGKLIIKKSKDGSEDKFYSHKKILQLIKSQKFLNKLVILVETEKEKILRKEYVFADSKKREGFCQLLQQMKNKHSEQPEPDMITIFIGTWNMGNAPPPKKITSWFLSKGQGKTRDDSADYIPHDIYVIGTQEDPLSEKEWLEILKHSLQEITSVTFKTVAIHTLWNIRIVVLAKPEHENRISHICTDNVKTGIANTLGNKGAVGVSFMFNGTSLGFVNSHLTSGSEKKLRRNQNYMNILRFLALGDKKLSPFNITHRFTHLFWFGDLNYRVDLPTWEAETIIQKIKQQQYADLLSHDQLLTERREQKVFLHFEEEEITFAPTYRFERLTRDKYAYTKQKATGMKYNLPSWCDRVLWKSYPLVHVVCQSYGSTSDIMTSDHSPVFATFEAGVTSQFVSKNGPGTVDSQGQIEFLRCYATLKTKSQTKFYLEFHSSCLESFVKSQEGENEEGSEGELVVKFGETLPKLKPIISDPEYLLDQHILISIKSSDSDESYGEGCIALRLEATETQLPIYTPLTHHGELTGHFQGEIKLQTSQGKTREKLYDFVKTERDESSGPKTLKSLTSHDPMKQWEVTSRAPPCSGSSITEIINPNYMGVGPFGPPMPLHVKQTLSPDQQPTAWSYDQPPKDSPLGPCRGESPPTPPGQPPISPKKFLPSTANRGLPPRTQESRPSDLGKNAGDTLPQEDLPLTKPEMFENPLYGSLSSFPKPAPRKDQESPKMPRKEPPPCPEPGILSPSIVLTKAQEADRGEGPGKQVPAPRLRSFTCSSSAEGRAAGGDKSQGKPKTPVSSQAPVPAKRPIKPSRSEINQQTPPTPTPRPPLPVKSPAVLHLQHSKGRDYRDNTELPHHGKHRPEEGPPGPLGRTAMQ

SEQ ID NO: 17753 - protein, 494 aa, Artificial Sequence
  Synthetic polypeptide
KERDHVLCRNMDGAGESVVSPPELPPRNIPLTASSCEAKEVPFSNENPRATETSRPSLSETLFQRLQSMDTSGLPEEHLKAIQDYLSTQLAQDSEFVKTGSSSLPHLKKLTTLLCKELYGYCLEVLLSYPLSLLSQVPGEANPINMVSKLSQLTSLLSSIEDKVKALLHEGPESPHRPSLIPPVTFEVKAESLGIPQKMQLKVDVESGKLIIKKSKDGSEDKFYSHKKILQLIKSQKFLNKLVILVETEKEKILRKEYVFADSKKREGFCQLLQQMKNKHSEQPEPDMITIFIGTWNMGNAPPPKKITSWFLSKGQGKTRDDSADYIPHDIYVIGTQEDPLSEKEWLEILKHSLQEITSVTFKTVAIHTLWNIRIVVLAKPEHENRISHICTDNVKTGIANTLGNKGAVGVSFMFNGTSLGFVNSHLTSGSEKKLRRNQNYMNILRFLALGDKKLSPFNITHRFTHLFWFGDLNYRVDLPTWEAETIIQKIKQQ

SEQ ID NO: 17754 - protein, 54 aa, Artificial Sequence
  Synthetic polypeptide
MPISDDWIKKMLYIYTMEYYAASKKNEIMSFAGTWMELEKVSCLHPSCPQETSR

SEQ ID NO: 17755 - protein, 51 aa, Artificial Sequence
  Synthetic polypeptide
RKCCIYTPWNTMQPVKRTRSCPLQEHGWSWRKCRVSTRAAPKKHPADCQLL

SEQ ID NO: 17756 - protein, 22 aa, Artificial Sequence
  Synthetic polypeptide
DVEAEDNDTDDPDSVPSSKRGC

SEQ ID NO: 17757 - protein, 55 aa, Artificial Sequence
  Synthetic polypeptide
EVTAPCTSLSLKTFQWDRMWRRKIMILMILTLYHHQRGDADQTEQFIPAIKKEIL

SEQ ID NO: 17758 - protein, 144 aa, Artificial Sequence
  Synthetic polypeptide
LCTIIKEGMLTKQNNSFQRSKRRYFKLRGRTLYYAKTAKSIIFDEVDLTDASVAESSTKNVNNSFTVITPCRKLILCADNRKEMEDWIAALKTVQNREHFEPTQYSMDHFSGMHNWYACSHARPTYCNVCREALSGVTSHGLSC

SEQ ID NO: 17759 - protein, 1164 aa, Artificial Sequence
  Synthetic polypeptide
LCTIIKEGMLTKQNNSFQRSKRRYFKLRGRTLYYAKTAKSIIFDEVDLTDASVAESSTKNVNNSFTVITPCRKLILCADNRKEMEDWIAALKTVQNREHFEPTQYSMDHFSGMHNWYACSHARPTYCNVCREALSGVTSHGLSCEVCKFKAHKRCAVRATNNCKWTTLASIGKDIIEDADGIAMPHQWLEGNLPVSAKCTVCDKTCGSVLRLQDWRCLWCKAMVHTSCKESLLTKCPLGLCKVSVIPPTALNSIDSDGFWKASCPPSCTSPLLVFVNSKSGDNQGVKFLRRFKQLLNPAQVFDLMNGGPHLGLRLFQKFDTFRILVCGGDGSVGWVLSEIDSLNLHKQCQLGVLPLGTGNDLARVLGWGSACDDDTQLPQILEKLERASTKMLDRWSVMAYEAKLPRQASSSTVTEDFSEDSEVQQILFYEDSVAAHLSKILTSDQHSVVISSAKVLCETVKDFVARVGKAYEKTTESSEESEVMAKKCSVLKEKLDSLLKTLDDESQASSSLPNPPPTIAEEAEDGDGSGSICGSTGDRLVASACPARPQIFRPREQLMLRANSLKKAIRQIIEHTEKAVDEQNAQTQEQEGFVLGLSESEEKMDHRVCPPLSHSESFGVPKGRSQRKVSKSPCEKLISKGSLSLGSSASLPPQPGSRDGLPALNTKILYPNVRAGMSGSLPGGSVISRLLINADPFNSEPETLEYYTEKCVMNNYFGIGLDAKISLDFNNKRDEHPEKCRSRTKNMMWYGVLGTKELLHRTYKNLEQKVLLECDGRPIPLPSLQGIAVLNIPSYAGGTNFWGGTKEDDTFAAPSFDDKILEVVAVFGSMQMAVSRVIRLQHHRIAQCRTVKISILGDEGVPVQVDGEAWVQPPGYIRIVHKNRAQTLTRDRAFESTLKSWEDKQKCELPRPPSCSLHPEMLSEEEATQMDQFGQAAGVLIHSIREIAQSHRDMEQELAHAVNASSKSMDRVYGKPRTTEGLNCSFVLEMVNNFRALRSETELLLSGKMALQLDPPQKEQLGSALAEMDRQLRRLADTPWLCQSAEPGDEESVMLDLAKRSRSGKFRLVTKFKKEKNNKNKEAHSSLGAPVHLWGTEEVAAWLEHLSLCEYKDIFTRHDIRGSELLHLERRDLKDLGVTKVGHMKRILCGIKELSRSAPAVEA

SEQ ID NO: 17760 - protein, 140 aa, Artificial Sequence
  Synthetic polypeptide
CRRVFIRQILVILRIKAQQSNTRRLAKESVMLDLAKRSRSGKFRLVTKFKKEKNNKNKEAHSSLGAPVHLWGTEEVAAWLEHLSLCEYKDIFTRHDIRGSELLHLERRDLKDLGVTKVGHMKRILCGIKELSRSAPAVEA

SEQ ID NO: 17761 - protein, 16 aa, Artificial Sequence
  Synthetic polypeptide
ESKPSNPTLEDWLKRV

SEQ ID NO: 17762 - protein, 14 aa, Artificial Sequence
  Synthetic polypeptide
RECDAGSCQAQSQW

SEQ ID NO: 17763 - protein, 80 aa, Artificial Sequence
  Synthetic polypeptide
AQPRADSEWIFGRMCASVAMPRASTWKAPRSTKVRNGTTRNTPRNFLPTPLGIFSLRHWGRKGSIYVCPATRTRKSFTSC

SEQ ID NO: 17764 - protein, 1046 aa, Artificial Sequence
  Synthetic polypeptide
LRVDFRENVCKCGYAQSQHMEGTQINQSEKWNYKKHTKEFPTDAFGDIQFETLGKKGKYIRLSCDTDAEILYELLTQHWHLKTPNLVISVTGGAKNFALKPRMRKIFSRLIYIAQSKGAWILTGGTHYGLMKYIGEVVRDNTISRSSEENIVAIGIAAWGMVSNRDTLIRNCDAEGYFLAQYLMDDFTRDPLYILDNNHTHLLLVDNGCHGHPTVEAKLRNQLEKYISERTIQDSNYGGKIPIVCFAQGGGKETLKAINTSIKNKIPCVVVEGSGQIADVIASLVEVEDALTSSAVKEKLVRFLPRTVSRLPEEETESWIKWLKEILECSHLLTVIKMEEAGDEIVSNAISYALYKAFSTSEQDKDNWNGQLKLLLEWNQLDLANDEIFTNDRRWESADLQEVMFTALIKDRPKFVRLFLENGLNLRKFLTHDVLTELFSNHFSTLVYRNLQIAKNSYNDALLTFVWKLVANFRRGFRKEDRNGRDEMDIELHDVSPITRHPLQALFIWAILQNKKELSKVIWEQTRGCTLAALGASKLLKTLAKVKNDINAAGESEELANEYETRAVELFTECYSSDEDLAEQLLVYSCEAWGGSNCLELAVEATDQHFIAQPGVQNFLSKQWYGEISRDTKNWKIILCLFIIPLVGCGFVSFRKKPVDKHKKLLWYYVAFFTSPFVVFSWNVVFYIAFLLLFAYVLLMDFHSVPHPPELVLYSLVFVLFCDEVRQWYVNGVNYFTDLWNVMDTLGLFYFIAGIVFRLHSSNKSSLYSGRVIFCLDYIIFTLRLIHIFTVSRNLGPKIIMLQRMLIDVFFFLFLFAVWMVAFGVARQGILRQNEQRWRWIFRSVIYEPYLAMFGQVPSDVDGTTYDFAHCTFTGNESKPLCVELDEHNLPRFPEWITIPLVCIYMLSTNILLVNLLVAMFGYTVGTVQENNDQVWKFQRYFLVQEYCSRLNIPFPFIVFAYFYMVVKKCFKCCCKEKNMESSVCCFKNEDNETLAWEGVMKENYLVKINTKANDTSEEMRHRFRQLDTKLNDLKGLLKEIANKIK

SEQ ID NO: 17765 - protein, 267 aa, Artificial Sequence
  Synthetic polypeptide
LRVDFRENVCKCGYAQSQHMEGTQINQSEKWNYKKHTKEFPTDAFGDIQFETLGKKGKYIRLSCDTDAEILYELLTQHWHLKTPNLVISVTGGAKNFALKPRMRKIFSRLIYIAQSKGAWILTGGTHYGLMKYIGEVVRDNTISRSSEENIVAIGIAAWGMVSNRDTLIRNCDAEGYFLAQYLMDDFTRDPLYILDNNHTHLLLVDNGCHGHPTVEAKLRNQLEKYISERTIQDSNYGGKIPIVCFAQGGGKETLKSRRFGRRISVT

SEQ ID NO: 17766 - protein, 184 aa, Artificial Sequence
  Synthetic polypeptide
LRVDFRENVCKCGYAQSQHMEGTQINQSEKWNYKKHTKEFPTDAFGDIQFETLGKKGKYIRLSCDTDAEILYELLTQHWHLKTPNLVISVTGGAKNFALKPRMRKIFSRLIYIAQSKGAWILTGGTHYGLMKYIGEVVRDNTISRSSEENIVAIGIAAWGMVSNRDTLIRNCDAEVPVGQEEVC

SEQ ID NO: 17767 - protein, 33 aa, Artificial Sequence
  Synthetic polypeptide
LSPGLTQSGFSGECVQVWLCPEPAHGRHPDQPK

SEQ ID NO: 17768 - protein, 40 aa, Artificial Sequence
  Synthetic polypeptide
KALWPPTLPLLKLLTLEEASCHVKRTLKQPYREAHQVNQV

SEQ ID NO: 17769 - protein, 47 aa, Artificial Sequence
  Synthetic polypeptide
KCCHFLRLGHKRHYGPPPCLFSNYSLWRKPAVMSREHSSSLTGKPTK

SEQ ID NO: 17770 - protein, 45 aa, Artificial Sequence
  Synthetic polypeptide
VIKGIMAPHLASSQITHSGGSQLSCQENTQAALQGSPPSESGLGK

SEQ ID NO: 17771 - protein, 47 aa, Artificial Sequence
  Synthetic polypeptide
VIKGIMAPHLASSQITHSGGSQLSCQENTQAALQGSPPSESGLGKST

SEQ ID NO: 17772 - protein, 66 aa, Artificial Sequence
  Synthetic polypeptide
VIKGIMAPHLASSQITHSGGSQLSCQENTQAALQGSPPSESGLGKSTLINSLFLTDLYPERVIPGA

SEQ ID NO: 17773 - protein, 67 aa, Artificial Sequence
  Synthetic polypeptide
VIKGIMAPHLASSQITHSGGSQLSCQENTQAALQGSPPSESGLGKSTLINSLFLTDLYPERVIPGAA

SEQ ID NO: 17774 - protein, 366 aa, Artificial Sequence
  Synthetic polypeptide
VIKGIMAPHLASSQITHSGGSQLSCQENTQAALQGSPPSESGLGKSTLINSLFLTDLYPERVIPGAAALNTRKTLLWEKIERTVQIEASTVEIEERGVKLRLTVVDTPGYGDAINCRDCFKTIISYIDEQFERYLHDESGLNRRHIIDNRVHCCFYFISPFGHGLKPLDVAFMKAIHNKVNIVPVIAKADTLTLKERERLKKRILDEIEEHNIKIYHLPDAESDEDEDFKEQTRLLKASIPFSVVGSNQLIEAKGKKVRGRLYPWGVVEVENPEHNDFLKLRTMLITHMQDLQEVTQDLHYENFRSERLKRGGRKVENEDMNKDQILLEKEAELRRMQEMIARMQAQMQMQMQGGDGDGGALGHHV

SEQ ID NO: 17775 - protein, 100 aa, Artificial Sequence
  Synthetic polypeptide
VIKGIMAPHLASSQITHSGGSQLSCQENTQAALQGSPPSESGLGKSTLINSLFLTDLYPERVIPGAAEKIERTVQIEASTVEIEERGVKLRLTVVDTPGY

SEQ ID NO: 17776 - protein, 126 aa, Artificial Sequence
  Synthetic polypeptide
VIKGIMAPHLASSQITHSGGSQLSCQENTQAALQGSPPSESGLGKSTLINSLFLTDLYPERVIPGAAEKIERTVQIEASTVEIEERGVKLRLTVVDTPGYGDAINCRDCFKTIISYIDEQFERYLH

SEQ ID NO: 17777 - protein, 131 aa, Artificial Sequence
  Synthetic polypeptide
VIKGIMAPHLASSQITHSGGSQLSCQENTQAALQGSPPSESGLGKSTLINSLFLTDLYPERVIPGAAEKIERTVQIEASTVEIEERGVKLRLTVVDTPGYGDAINCRDCFKTIISYIDEQFERYLHDESGL

SEQ ID NO: 17778 - protein, 143 aa, Artificial Sequence
  Synthetic polypeptide
VIKGIMAPHLASSQITHSGGSQLSCQENTQAALQGSPPSESGLGKSTLINSLFLTDLYPERVIPGAAEKIERTVQIEASTVEIEERGVKLRLTVVDTPGYGDAINCRDCFKTIISYIDEQFERYLHDESGLNRRHIIDNRVHC

SEQ ID NO: 17779 - protein, 156 aa, Artificial Sequence
  Synthetic polypeptide
VIKGIMAPHLASSQITHSGGSQLSCQENTQAALQGSPPSESGLGKSTLINSLFLTDLYPERVIPGAAEKIERTVQIEASTVEIEERGVKLRLTVVDTPGYGDAINCRDCFKTIISYIDEQFERYLHDESGLNRRHIIDNRVHCCFYFISPFGHGLK

SEQ ID NO: 17780 - protein, 168 aa, Artificial Sequence
  Synthetic polypeptide
VIKGIMAPHLASSQITHSGGSQLSCQENTQAALQGSPPSESGLGKSTLINSLFLTDLYPERVIPGAAEKIERTVQIEASTVEIEERGVKLRLTVVDTPGYGDAINCRDCFKTIISYIDEQFERYLHDESGLNRRHIIDNRVHCCFYFISPFGHGLKPLDVAFMKAIHN

SEQ ID NO: 17781 - protein, 219 aa, Artificial Sequence
  Synthetic polypeptide
VIKGIMAPHLASSQITHSGGSQLSCQENTQAALQGSPPSESGLGKSTLINSLFLTDLYPERVIPGAAEKIERTVQIEASTVEIEERGVKLRLTVVDTPGYGDAINCRDCFKTIISYIDEQFERYLHDESGLNRRHIIDNRVHCCFYFISPFGHGLKPLDVAFMKAIHNKVNIVPVIAKADTLTLKERERLKKRILDEIEEHNIKIYHLPDAESDEDEDF

SEQ ID NO: 17782 - protein, 356 aa, Artificial Sequence
  Synthetic polypeptide
VIKGIMAPHLASSQITHSGGSQLSCQENTQAALQGSPPSESGLGKSTLINSLFLTDLYPERVIPGAAEKIERTVQIEASTVEIEERGVKLRLTVVDTPGYGDAINCRDCFKTIISYIDEQFERYLHDESGLNRRHIIDNRVHCCFYFISPFGHGLKPLDVAFMKAIHNKVNIVPVIAKADTLTLKERERLKKRILDEIEEHNIKIYHLPDAESDEDEDFKEQTRLLKASIPFSVVGSNQLIEAKGKKVRGRLYPWGVVEVENPEHNDFLKLRTMLITHMQDLQEVTQDLHYENFRSERLKRGGRKVENEDMNKDQILLEKEAELRRMQEMIARMQAQMQMQMQGGDGDGGALGHHV

SEQ ID NO: 17783 - protein, 129 aa, Artificial Sequence
  Synthetic polypeptide
VIKGIMAPHLASSQITHSGGSQLSCQENTQAALQGSPPSESGLGKSTLINSLFLTDLYPERVIPGAAEKIERTVQIEASTVEIEERGVKLRLTVVDTPGYGDAINCRDWYAPPCPGICICLLNILHKFI

SEQ ID NO: 17784 - protein, 75 aa, Artificial Sequence
  Synthetic polypeptide
VIKGIMAPHLASSQITHSGGSQLSCQENTQAALQGSPPSESGLGKSTLINSLFLTDLYPERVIPGAAVCFFSRKN

SEQ ID NO: 17785 - protein, 15 aa, Artificial Sequence
  Synthetic polypeptide
GTKACQWLCESGLGK

SEQ ID NO: 17786 - protein, 17 aa, Artificial Sequence
  Synthetic polypeptide
GTKACQWLCESGLGKST

SEQ ID NO: 17787 - protein, 36 aa, Artificial Sequence
  Synthetic polypeptide
GTKACQWLCESGLGKSTLINSLFLTDLYPERVIPGA

SEQ ID NO: 17788 - protein, 37 aa, Artificial Sequence
  Synthetic polypeptide
GTKACQWLCESGLGKSTLINSLFLTDLYPERVIPGAA

SEQ ID NO: 17789 - protein, 336 aa, Artificial Sequence
  Synthetic polypeptide
GTKACQWLCESGLGKSTLINSLFLTDLYPERVIPGAAALNTRKTLLWEKIERTVQIEASTVEIEERGVKLRLTVVDTPGYGDAINCRDCFKTIISYIDEQFERYLHDESGLNRRHIIDNRVHCCFYFISPFGHGLKPLDVAFMKAIHNKVNIVPVIAKADTLTLKERERLKKRILDEIEEHNIKIYHLPDAESDEDEDFKEQTRLLKASIPFSVVGSNQLIEAKGKKVRGRLYPWGVVEVENPEHNDFLKLRTMLITHMQDLQEVTQDLHYENFRSERLKRGGRKVENEDMNKDQILLEKEAELRRMQEMIARMQAQMQMQMQGGDGDGGALGHHV

SEQ ID NO: 17790 - protein, 70 aa, Artificial Sequence
  Synthetic polypeptide
GTKACQWLCESGLGKSTLINSLFLTDLYPERVIPGAAEKIERTVQIEASTVEIEERGVKLRLTVVDTPGY

SEQ ID NO: 17791 - protein, 96 aa, Artificial Sequence
  Synthetic polypeptide
GTKACQWLCESGLGKSTLINSLFLTDLYPERVIPGAAEKIERTVQIEASTVEIEERGVKLRLTVVDTPGYGDAINCRDCFKTIISYIDEQFERYLH

SEQ ID NO: 17792 - protein, 101 aa, Artificial Sequence
  Synthetic polypeptide
GTKACQWLCESGLGKSTLINSLFLTDLYPERVIPGAAEKIERTVQIEASTVEIEERGVKLRLTVVDTPGYGDAINCRDCFKTIISYIDEQFERYLHDESGL

SEQ ID NO: 17793 - protein, 113 aa, Artificial Sequence
  Synthetic polypeptide
GTKACQWLCESGLGKSTLINSLFLTDLYPERVIPGAAEKIERTVQIEASTVEIEERGVKLRLTVVDTPGYGDAINCRDCFKTIISYIDEQFERYLHDESGLNRRHIIDNRVHC

SEQ ID NO: 17794 - protein, 126 aa, Artificial Sequence
  Synthetic polypeptide
GTKACQWLCESGLGKSTLINSLFLTDLYPERVIPGAAEKIERTVQIEASTVEIEERGVKLRLTVVDTPGYGDAINCRDCFKTIISYIDEQFERYLHDESGLNRRHIIDNRVHCCFYFISPFGHGLK

SEQ ID NO: 17795 - protein, 138 aa, Artificial Sequence
  Synthetic polypeptide
GTKACQWLCESGLGKSTLINSLFLTDLYPERVIPGAAEKIERTVQIEASTVEIEERGVKLRLTVVDTPGYGDAINCRDCFKTIISYIDEQFERYLHDESGLNRRHIIDNRVHCCFYFISPFGHGLKPLDVAFMKAIHN

SEQ ID NO: 17796 - protein, 189 aa, Artificial Sequence
  Synthetic polypeptide
GTKACQWLCESGLGKSTLINSLFLTDLYPERVIPGAAEKIERTVQIEASTVEIEERGVKLRLTVVDTPGYGDAINCRDCFKTIISYIDEQFERYLHDESGLNRRHIIDNRVHCCFYFISPFGHGLKPLDVAFMKAIHNKVNIVPVIAKADTLTLKERERLKKRILDEIEEHNIKIYHLPDAESDEDEDF

SEQ ID NO: 17797 - protein, 326 aa, Artificial Sequence
  Synthetic polypeptide
GTKACQWLCESGLGKSTLINSLFLTDLYPERVIPGAAEKIERTVQIEASTVEIEERGVKLRLTVVDTPGYGDAINCRDCFKTIISYIDEQFERYLHDESGLNRRHIIDNRVHCCFYFISPFGHGLKPLDVAFMKAIHNKVNIVPVIAKADTLTLKERERLKKRILDEIEEHNIKIYHLPDAESDEDEDFKEQTRLLKASIPFSVVGSNQLIEAKGKKVRGRLYPWGVVEVENPEHNDFLKLRTMLITHMQDLQEVTQDLHYENFRSERLKRGGRKVENEDMNKDQILLEKEAELRRMQEMIARMQAQMQMQMQGGDGDGGALGHHV

SEQ ID NO: 17798 - protein, 99 aa, Artificial Sequence
  Synthetic polypeptide
GTKACQWLCESGLGKSTLINSLFLTDLYPERVIPGAAEKIERTVQIEASTVEIEERGVKLRLTVVDTPGYGDAINCRDWYAPPCPGICICLLNILHKFI

SEQ ID NO: 17799 - protein, 45 aa, Artificial Sequence
  Synthetic polypeptide
GTKACQWLCESGLGKSTLINSLFLTDLYPERVIPGAAVCFFSRKN

SEQ ID NO: 17800 - protein, 46 aa, Artificial Sequence
  Synthetic polypeptide
KALWPPTLPLLKLLTLEEASCHVKRTLKQPYREAHQVRNQGLPMAV

SEQ ID NO: 17801 - protein, 52 aa, Artificial Sequence
  Synthetic polypeptide
VIKGIMAPHLASSQITHSGGSQLSCQENTQAALQGSPPSKEPRPANGCVNQV

SEQ ID NO: 17802 - protein, 11 aa, Artificial Sequence
  Synthetic polypeptide
ILHRHLHEIDE

SEQ ID NO: 17803 - protein, 8 aa, Artificial Sequence
  Synthetic polypeptide
MSESGLGK

SEQ ID NO: 17804 - protein, 10 aa, Artificial Sequence
  Synthetic polypeptide
MSESGLGKST

SEQ ID NO: 17805 - protein, 29 aa, Artificial Sequence
  Synthetic polypeptide
MSESGLGKSTLINSLFLTDLYPERVIPGA

SEQ ID NO: 17806 - protein, 30 aa, Artificial Sequence
  Synthetic polypeptide
MSESGLGKSTLINSLFLTDLYPERVIPGAA

SEQ ID NO: 17807 - protein, 329 aa, Artificial Sequence
  Synthetic polypeptide
MSESGLGKSTLINSLFLTDLYPERVIPGAAALNTRKTLLWEKIERTVQIEASTVEIEERGVKLRLTVVDTPGYGDAINCRDCFKTIISYIDEQFERYLHDESGLNRRHIIDNRVHCCFYFISPFGHGLKPLDVAFMKAIHNKVNIVPVIAKADTLTLKERERLKKRILDEIEEHNIKIYHLPDAESDEDEDFKEQTRLLKASIPFSVVGSNQLIEAKGKKVRGRLYPWGVVEVENPEHNDFLKLRTMLITHMQDLQEVTQDLHYENFRSERLKRGGRKVENEDMNKDQILLEKEAELRRMQEMIARMQAQMQMQMQGGDGDGGALGHHV

SEQ ID NO: 17808 - protein, 63 aa, Artificial Sequence
  Synthetic polypeptide
MSESGLGKSTLINSLFLTDLYPERVIPGAAEKIERTVQIEASTVEIEERGVKLRLTVVDTPGY

SEQ ID NO: 17809 - protein, 89 aa, Artificial Sequence
  Synthetic polypeptide
MSESGLGKSTLINSLFLTDLYPERVIPGAAEKIERTVQIEASTVEIEERGVKLRLTVVDTPGYGDAINCRDCFKTIISYIDEQFERYLH

SEQ ID NO: 17810 - protein, 94 aa, Artificial Sequence
  Synthetic polypeptide
MSESGLGKSTLINSLFLTDLYPERVIPGAAEKIERTVQIEASTVEIEERGVKLRLTVVDTPGYGDAINCRDCFKTIISYIDEQFERYLHDESGL

SEQ ID NO: 17811 - protein, 106 aa, Artificial Sequence
  Synthetic polypeptide
MSESGLGKSTLINSLFLTDLYPERVIPGAAEKIERTVQIEASTVEIEERGVKLRLTVVDTPGYGDAINCRDCFKTIISYIDEQFERYLHDESGLNRRHIIDNRVHC

SEQ ID NO: 17812 - protein, 119 aa, Artificial Sequence
  Synthetic polypeptide
MSESGLGKSTLINSLFLTDLYPERVIPGAAEKIERTVQIEASTVEIEERGVKLRLTVVDTPGYGDAINCRDCFKTIISYIDEQFERYLHDESGLNRRHIIDNRVHCCFYFISPFGHGLK

SEQ ID NO: 17813 - protein, 131 aa, Artificial Sequence
  Synthetic polypeptide
MSESGLGKSTLINSLFLTDLYPERVIPGAAEKIERTVQIEASTVEIEERGVKLRLTVVDTPGYGDAINCRDCFKTIISYIDEQFERYLHDESGLNRRHIIDNRVHCCFYFISPFGHGLKPLDVAFMKAIHN

SEQ ID NO: 17814 - protein, 182 aa, Artificial Sequence
  Synthetic polypeptide
MSESGLGKSTLINSLFLTDLYPERVIPGAAEKIERTVQIEASTVEIEERGVKLRLTVVDTPGYGDAINCRDCFKTIISYIDEQFERYLHDESGLNRRHIIDNRVHCCFYFISPFGHGLKPLDVAFMKAIHNKVNIVPVIAKADTLTLKERERLKKRILDEIEEHNIKIYHLPDAESDEDEDF

SEQ ID NO: 17815 - protein, 319 aa, Artificial Sequence
  Synthetic polypeptide
MSESGLGKSTLINSLFLTDLYPERVIPGAAEKIERTVQIEASTVEIEERGVKLRLTVVDTPGYGDAINCRDCFKTIISYIDEQFERYLHDESGLNRRHIIDNRVHCCFYFISPFGHGLKPLDVAFMKAIHNKVNIVPVIAKADTLTLKERERLKKRILDEIEEHNIKIYHLPDAESDEDEDFKEQTRLLKASIPFSVVGSNQLIEAKGKKVRGRLYPWGVVEVENPEHNDFLKLRTMLITHMQDLQEVTQDLHYENFRSERLKRGGRKVENEDMNKDQILLEKEAELRRMQEMIARMQAQMQMQMQGGDGDGGALGHHV

SEQ ID NO: 17816 - protein, 92 aa, Artificial Sequence
  Synthetic polypeptide
MSESGLGKSTLINSLFLTDLYPERVIPGAAEKIERTVQIEASTVEIEERGVKLRLTVVDTPGYGDAINCRDWYAPPCPGICICLLNILHKFI

SEQ ID NO: 17817 - protein, 38 aa, Artificial Sequence
  Synthetic polypeptide
MSESGLGKSTLINSLFLTDLYPERVIPGAAVCFFSRKN

SEQ ID NO: 17818 - protein, 23 aa, Artificial Sequence
  Synthetic polypeptide
GGLITSFKTIISYIDEQFERYLH

SEQ ID NO: 17819 - protein, 28 aa, Artificial Sequence
  Synthetic polypeptide
GGLITSFKTIISYIDEQFERYLHDESGL

SEQ ID NO: 17820 - protein, 40 aa, Artificial Sequence
  Synthetic polypeptide
GGLITSFKTIISYIDEQFERYLHDESGLNRRHIIDNRVHC

SEQ ID NO: 17821 - protein, 53 aa, Artificial Sequence
  Synthetic polypeptide
GGLITSFKTIISYIDEQFERYLHDESGLNRRHIIDNRVHCCFYFISPFGHGLK

SEQ ID NO: 17822 - protein, 65 aa, Artificial Sequence
  Synthetic polypeptide
GGLITSFKTIISYIDEQFERYLHDESGLNRRHIIDNRVHCCFYFISPFGHGLKPLDVAFMKAIHN

SEQ ID NO: 17823 - protein, 81 aa, Artificial Sequence
  Synthetic polypeptide
GGLITSFKTIISYIDEQFERYLHDESGLNRRHIIDNRVHCCFYFISPFGHGLKPLDVAFMKAIHNKVNIVPVIAKADTLTL

SEQ ID NO: 17824 - protein, 116 aa, Artificial Sequence
  Synthetic polypeptide
GGLITSFKTIISYIDEQFERYLHDESGLNRRHIIDNRVHCCFYFISPFGHGLKPLDVAFMKAIHNKVNIVPVIAKADTLTLKERERLKKRILDEIEEHNIKIYHLPDAESDEDEDF

SEQ ID NO: 17825 - protein, 253 aa, Artificial Sequence
  Synthetic polypeptide
GGLITSFKTIISYIDEQFERYLHDESGLNRRHIIDNRVHCCFYFISPFGHGLKPLDVAFMKAIHNKVNIVPVIAKADTLTLKERERLKKRILDEIEEHNIKIYHLPDAESDEDEDFKEQTRLLKASIPFSVVGSNQLIEAKGKKVRGRLYPWGVVEVENPEHNDFLKLRTMLITHMQDLQEVTQDLHYENFRSERLKRGGRKVENEDMNKDQILLEKEAELRRMQEMIARMQAQMQMQMQGGDGDGGALGHHV

SEQ ID NO: 17826 - protein, 14 aa, Artificial Sequence
  Synthetic polypeptide
SQHFGRLRWADHKF

SEQ ID NO: 17827 - protein, 19 aa, Artificial Sequence
  Synthetic polypeptide
SQVLRQLSPILMSNLRGTC

SEQ ID NO: 17828 - protein, 24 aa, Artificial Sequence
  Synthetic polypeptide
SQVLRQLSPILMSNLRGTCMTRAA

SEQ ID NO: 17829 - protein, 33 aa, Artificial Sequence
  Synthetic polypeptide
GGLITRSGVRDQPGQHVLRQLSPILMSNLRGTC

SEQ ID NO: 17830 - protein, 38 aa, Artificial Sequence
  Synthetic polypeptide
GGLITRSGVRDQPGQHVLRQLSPILMSNLRGTCMTRAA

SEQ ID NO: 17831 - protein, 14 aa, Artificial Sequence
  Synthetic polypeptide
SQGQEFETSLANMF

SEQ ID NO: 17832 - protein, 41 aa, Artificial Sequence
  Synthetic polypeptide
SQHFGRLRWADHKVRSSRPAWPTCFKTIISYIDEQFERYLH

SEQ ID NO: 17833 - protein, 46 aa, Artificial Sequence
  Synthetic polypeptide
SQHFGRLRWADHKVRSSRPAWPTCFKTIISYIDEQFERYLHDESGL

SEQ ID NO: 17834 - protein, 58 aa, Artificial Sequence
  Synthetic polypeptide
SQHFGRLRWADHKVRSSRPAWPTCFKTIISYIDEQFERYLHDESGLNRRHIIDNRVHC

SEQ ID NO: 17835 - protein, 71 aa, Artificial Sequence
  Synthetic polypeptide
SQHFGRLRWADHKVRSSRPAWPTCFKTIISYIDEQFERYLHDESGLNRRHIIDNRVHCCFYFISPFGHGLK

SEQ ID NO: 17836 - protein, 83 aa, Artificial Sequence
  Synthetic polypeptide
SQHFGRLRWADHKVRSSRPAWPTCFKTIISYIDEQFERYLHDESGLNRRHIIDNRVHCCFYFISPFGHGLKPLDVAFMKAIHN

SEQ ID NO: 17837 - protein, 99 aa, Artificial Sequence
  Synthetic polypeptide
SQHFGRLRWADHKVRSSRPAWPTCFKTIISYIDEQFERYLHDESGLNRRHIIDNRVHCCFYFISPFGHGLKPLDVAFMKAIHNKVNIVPVIAKADTLTL

SEQ ID NO: 17838 - protein, 134 aa, Artificial Sequence
  Synthetic polypeptide
SQHFGRLRWADHKVRSSRPAWPTCFKTIISYIDEQFERYLHDESGLNRRHIIDNRVHCCFYFISPFGHGLKPLDVAFMKAIHNKVNIVPVIAKADTLTLKERERLKKRILDEIEEHNIKIYHLPDAESDEDEDF

SEQ ID NO: 17839 - protein, 271 aa, Artificial Sequence
  Synthetic polypeptide
SQHFGRLRWADHKVRSSRPAWPTCFKTIISYIDEQFERYLHDESGLNRRHIIDNRVHCCFYFISPFGHGLKPLDVAFMKAIHNKVNIVPVIAKADTLTLKERERLKKRILDEIEEHNIKIYHLPDAESDEDEDFKEQTRLLKASIPFSVVGSNQLIEAKGKKVRGRLYPWGVVEVENPEHNDFLKLRTMLITHMQDLQEVTQDLHYENFRSERLKRGGRKVENEDMNKDQILLEKEAELRRMQEMIARMQAQMQMQMQGGDGDGGALGHHV

SEQ ID NO: 17840 - protein, 13 aa, Artificial Sequence
  Synthetic polypeptide
ELAALSTLALSQF

SEQ ID NO: 17841 - protein, 29 aa, Artificial Sequence
  Synthetic polypeptide
NWQPCLHWPSLSFKTIISYIDEQFERYLH

SEQ ID NO: 17842 - protein, 34 aa, Artificial Sequence
  Synthetic polypeptide
NWQPCLHWPSLSFKTIISYIDEQFERYLHDESGL

SEQ ID NO: 17843 - protein, 46 aa, Artificial Sequence
  Synthetic polypeptide
NWQPCLHWPSLSFKTIISYIDEQFERYLHDESGLNRRHIIDNRVHC

SEQ ID NO: 17844 - protein, 59 aa, Artificial Sequence
  Synthetic polypeptide
NWQPCLHWPSLSFKTIISYIDEQFERYLHDESGLNRRHIIDNRVHCCFYFISPFGHGLK

SEQ ID NO: 17845 - protein, 71 aa, Artificial Sequence
  Synthetic polypeptide
NWQPCLHWPSLSFKTIISYIDEQFERYLHDESGLNRRHIIDNRVHCCFYFISPFGHGLKPLDVAFMKAIHN

SEQ ID NO: 17846 - protein, 87 aa, Artificial Sequence
  Synthetic polypeptide
NWQPCLHWPSLSFKTIISYIDEQFERYLHDESGLNRRHIIDNRVHCCFYFISPFGHGLKPLDVAFMKAIHNKVNIVPVIAKADTLTL

SEQ ID NO: 17847 - protein, 122 aa, Artificial Sequence
  Synthetic polypeptide
NWQPCLHWPSLSFKTIISYIDEQFERYLHDESGLNRRHIIDNRVHCCFYFISPFGHGLKPLDVAFMKAIHNKVNIVPVIAKADTLTLKERERLKKRILDEIEEHNIKIYHLPDAESDEDEDF

SEQ ID NO: 17848 - protein, 259 aa, Artificial Sequence
  Synthetic polypeptide
NWQPCLHWPSLSFKTIISYIDEQFERYLHDESGLNRRHIIDNRVHCCFYFISPFGHGLKPLDVAFMKAIHNKVNIVPVIAKADTLTLKERERLKKRILDEIEEHNIKIYHLPDAESDEDEDFKEQTRLLKASIPFSVVGSNQLIEAKGKKVRGRLYPWGVVEVENPEHNDFLKLRTMLITHMQDLQEVTQDLHYENFRSERLKRGGRKVENEDMNKDQILLEKEAELRRMQEMIARMQAQMQMQMQGGDGDGGALGHHV

SEQ ID NO: 17849 - protein, 29 aa, Artificial Sequence
  Synthetic polypeptide
RIGSPVYTGPLSVLRQLSPILMSNLRGTC

SEQ ID NO: 17850 - protein, 34 aa, Artificial Sequence
  Synthetic polypeptide
RIGSPVYTGPLSVLRQLSPILMSNLRGTCMTRAA

SEQ ID NO: 17851 - protein, 17 aa, Artificial Sequence
  Synthetic polypeptide
AKIMPLHSSPCDRESGE

SEQ ID NO: 17852 - protein, 87 aa, Artificial Sequence
  Synthetic polypeptide
CQLPRRLRWENCLNLGGGGCSEPRSCHYTPARATEKVENEDMNKDQILLEKEAELRRMQEMIARMQAQMQMQMQGGDGDGGALGHHV

SEQ ID NO: 17853 - protein, 26 aa, Artificial Sequence
  Synthetic polypeptide
EVEVAVSQDHATTLQPVRQRKWRMRT

SEQ ID NO: 17854 - protein, 56 aa, Artificial Sequence
  Synthetic polypeptide
GRARWLTLVIPALWEAEAGGSRAPPHARDDCKDAGADADADAGRGWRWRGSRAPRV

SEQ ID NO: 17855 - protein, 28 aa, Artificial Sequence
  Synthetic polypeptide
PGAVAHACNPSTLGGGGGWITSSAACKR

SEQ ID NO: 17856 - protein, 46 aa, Artificial Sequence
  Synthetic polypeptide
SQHFGRRRRVDHELRRMQEMIARMQAQMQMQMQGGDGDGGALGHHV

SEQ ID NO: 17857 - protein, 46 aa, Artificial Sequence
  Synthetic polypeptide
AEIAPLHSSLGDRLRRMQEMIARMQAQMQMQMQGGDGDGGALGHHV

SEQ ID NO: 17858 - protein, 9 aa, Artificial Sequence
  Synthetic polypeptide
ETDSAACKR

SEQ ID NO: 17859 - protein, 55 aa, Artificial Sequence
  Synthetic polypeptide
TREAEVAVSRDCATALQPRRQTPPHARDDCKDAGADADADAGRGWRWRGSRAPRV

SEQ ID NO: 17860 - protein, 503 aa, Artificial Sequence
  Synthetic polypeptide
NEENNPCPSGHSRLWLMTNYVTFMVGEILLLILTICSLAAIFPRAFPKKLVAFSTWIDRTRWARNTWAMLAIFILVMANVVDMLSCLQYYTGPSNATAGMETEGSCLENPKYYNYVAVLSLIATIMLVQVSHMVKLTLMLLVAGAVATINLYAWRPVFDEYDHKRFREHDLPMVALEQMQGFNPGLNGTDRLPLVPSKYSMTVMVFLMMLSFYYFSRHVEKLARTLFLWKIEVHDQKERVYEMRRWNEALVTNMLPEHVARHFLGSKKRDEELYSQTYDEIGVMFASLPNFADFYTEESINNGGIECLRFLNEIISDFDSLLDNPKFRVITKIKTIGSTYMAASGVTPDVNTNGFASSNKEDKSERERWQHLADLADFALAMKDTLTNINNQSFNNFMLRIGMNKGGVLAGVIGARKPHYDIWGNTVNVASRMESTGVMGNIQVVEETQVILREYGFRFVRRGPIFVKGKGELLTFFLKGRDKLATFPNGPSVTLPHQVVDNS

SEQ ID NO: 17861 - protein, 457 aa, Artificial Sequence
  Synthetic polypeptide
NEENNPCPSGHSRLWLMTNYVTFMVGEILLLILTICSLAAIFPRAFPKKLVAFSTWIDRTRWARNTWAMLAIFILVMANVVDMVSHMVKLTLMLLVAGAVATINLYAWRPVFDEYDHKRFREHDLPMVALEQMQGFNPGLNGTDRLPLVPSKYSMTVMVFLMMLSFYYFSRHVEKLARTLFLWKIEVHDQKERVYEMRRWNEALVTNMLPEHVARHFLGSKKRDEELYSQTYDEIGVMFASLPNFADFYTEESINNGGIECLRFLNEIISDFDSLLDNPKFRVITKIKTIGSTYMAASGVTPDVNTNGFASSNKEDKSERERWQHLADLADFALAMKDTLTNINNQSFNNFMLRIGMNKGGVLAGVIGARKPHYDIWGNTVNVASRMESTGVMGNIQVVEETQVILREYGFRFVRRGPIFVKGKGELLTFFLKGRDKLATFPNGPSVTLPHQVVDNS

SEQ ID NO: 17862 - protein, 48 aa, Artificial Sequence
  Synthetic polypeptide
QEPWAGSHYLRLRVCDHVQATAGSGSICFLICEMRRTTPALADTHDCG

SEQ ID NO: 17863 - protein, 38 aa, Artificial Sequence
  Synthetic polypeptide
RTLTTVANDKLCDLHGGGDSAPHPDHLLPGCHLSPGLS

SEQ ID NO: 17864 - protein, 88 aa, Artificial Sequence
  Synthetic polypeptide
SQHFGRPRRVHISQSTMDCLKGEFDVEPGDGGSRCDYLEEKGIETYLIIASKPEVKKTATQNGLNGSALPNGAPASSKSSSPALIETK

SEQ ID NO: 17865 - protein, 98 aa, Artificial Sequence
  Synthetic polypeptide
SQHFGRPRRVHISQSTMDCLKGEFDVEPGDGGSRCDYLEEKGIETYLIIASKPEVKKTATQNGLNGSALPNGAPASSKSSSPALIETKEPNGSAHSSG

SEQ ID NO: 17866 - protein, 700 aa, Artificial Sequence
  Synthetic polypeptide
SQHFGRPRRVHISQSTMDCLKGEFDVEPGDGGSRCDYLEEKGIETYLIIASKPEVKKTATQNGLNGSALPNGAPASSKSSSPALIETKEPNGSAHSSGSTSEKPEEQDAQADNPSFPNPRRRLRLQDLADRVVDASEDEHELNQLLNEALLERESAQVVKKRNTFLLSMRFMDPEMETRYSVEKEKQSGAAFSCSCVVLLCTALVEILIDPWLMTNYVTFMVGEILLLILTICSLAAIFPRAFPKKLVAFSTWIDRTRWARNTWAMLAIFILVMANVVDMLSCLQYYTGPSNATAGMETEGSCLENPKYYNYVAVLSLIATIMLVQVSHMVKLTLMLLVAGAVATINLYAWRPVFDEYDHKRFREHDLPMVALEQMQGFNPGLNGTDRLPLVPSKYSMTVMVFLMMLSFYYFSRHVEKLARTLFLWKIEVHDQKERVYEMRRWNEALVTNMLPEHVARHFLGSKKRDEELYSQTYDEIGVMFASLPNFADFYTEESINNGGIECLRFLNEIISDFDSLLDNPKFRVITKIKTIGSTYMAASGVTPDVNTNGFASSNKEDKSERERWQHLADLADFALAMKDTLTNINNQSFNNFMLRIGMNKGGVLAGVIGARKPHYDIWGNTVNVASRMESTGVMGNIQVVEETQVILREYGFRFVRRGPIFVKGKGELLTFFLKGRDKLATFPNGPSVTLPHQVVDNS

SEQ ID NO: 17867 - protein, 654 aa, Artificial Sequence
  Synthetic polypeptide
SQHFGRPRRVHISQSTMDCLKGEFDVEPGDGGSRCDYLEEKGIETYLIIASKPEVKKTATQNGLNGSALPNGAPASSKSSSPALIETKEPNGSAHSSGSTSEKPEEQDAQADNPSFPNPRRRLRLQDLADRVVDASEDEHELNQLLNEALLERESAQVVKKRNTFLLSMRFMDPEMETRYSVEKEKQSGAAFSCSCVVLLCTALVEILIDPWLMTNYVTFMVGEILLLILTICSLAAIFPRAFPKKLVAFSTWIDRTRWARNTWAMLAIFILVMANVVDMVSHMVKLTLMLLVAGAVATINLYAWRPVFDEYDHKRFREHDLPMVALEQMQGFNPGLNGTDRLPLVPSKYSMTVMVFLMMLSFYYFSRHVEKLARTLFLWKIEVHDQKERVYEMRRWNEALVTNMLPEHVARHFLGSKKRDEELYSQTYDEIGVMFASLPNFADFYTEESINNGGIECLRFLNEIISDFDSLLDNPKFRVITKIKTIGSTYMAASGVTPDVNTNGFASSNKEDKSERERWQHLADLADFALAMKDTLTNINNQSFNNFMLRIGMNKGGVLAGVIGARKPHYDIWGNTVNVASRMESTGVMGNIQVVEETQVILREYGFRFVRRGPIFVKGKGELLTFFLKGRDKLATFPNGPSVTLPHQVVDNS

SEQ ID NO: 17868 - protein, 25 aa, Artificial Sequence
  Synthetic polypeptide
VAHACNPSTLGGRGACTSPRAPWTA

SEQ ID NO: 17869 - protein, 29 aa, Artificial Sequence
  Synthetic polypeptide
WLTPVIPALWEAEARAHLPEHHGLPERGV

SEQ ID NO: 17870 - protein, 24 aa, Artificial Sequence
  Synthetic polypeptide
GLPSHAELRTSCFPSCPSTWLTRC

SEQ ID NO: 17871 - protein, 102 aa, Artificial Sequence
  Synthetic polypeptide
TENLMLSILPKHVADEMLKDMKKDESQKDQQQFNTMYMYRHENVSILFADIVGFTQLSSACSAQELVKLLNELFARFDKLAAKYHQLRIKILGDCYYCICGL

SEQ ID NO: 17872 - protein, 258 aa, Artificial Sequence
  Synthetic polypeptide
TENLMLSILPKHVADEMLKDMKKDESQKDQQQFNTMYMYRHENVSILFADIVGFTQLSSACSAQELVKLLNELFARFDKLAAKYHQLRIKILGDCYYCICGLPDYREDHAVCSILMGLAMVEAISYVREKTKTGVDMRVGVHTGTVLGGVLGQKRWQYDVWSTDVTVANKMEAGGIPGRVHISQSTMDCLKGEFDVEPGDGGSRCDYLEEKGIETYLIIASKPEVKKTATQNGLNGSALPNGAPASSKSSSPALIETK

SEQ ID NO: 17873 - protein, 870 aa, Artificial Sequence
  Synthetic polypeptide
TENLMLSILPKHVADEMLKDMKKDESQKDQQQFNTMYMYRHENVSILFADIVGFTQLSSACSAQELVKLLNELFARFDKLAAKYHQLRIKILGDCYYCICGLPDYREDHAVCSILMGLAMVEAISYVREKTKTGVDMRVGVHTGTVLGGVLGQKRWQYDVWSTDVTVANKMEAGGIPGRVHISQSTMDCLKGEFDVEPGDGGSRCDYLEEKGIETYLIIASKPEVKKTATQNGLNGSALPNGAPASSKSSSPALIETKEPNGSAHSSGSTSEKPEEQDAQADNPSFPNPRRRLRLQDLADRVVDASEDEHELNQLLNEALLERESAQVVKKRNTFLLSMRFMDPEMETRYSVEKEKQSGAAFSCSCVVLLCTALVEILIDPWLMTNYVTFMVGEILLLILTICSLAAIFPRAFPKKLVAFSTWIDRTRWARNTWAMLAIFILVMANVVDMLSCLQYYTGPSNATAGMETEGSCLENPKYYNYVAVLSLIATIMLVQVSHMVKLTLMLLVAGAVATINLYAWRPVFDEYDHKRFREHDLPMVALEQMQGFNPGLNGTDRLPLVPSKYSMTVMVFLMMLSFYYFSRHVEKLARTLFLWKIEVHDQKERVYEMRRWNEALVTNMLPEHVARHFLGSKKRDEELYSQTYDEIGVMFASLPNFADFYTEESINNGGIECLRFLNEIISDFDSLLDNPKFRVITKIKTIGSTYMAASGVTPDVNTNGFASSNKEDKSERERWQHLADLADFALAMKDTLTNINNQSFNNFMLRIGMNKGGVLAGVIGARKPHYDIWGNTVNVASRMESTGVMGNIQVVEETQVILREYGFRFVRRGPIFVKGKGELLTFFLKGRDKLATFPNGPSVTLPHQVVDNS

SEQ ID NO: 17874 - protein, 45 aa, Artificial Sequence
  Synthetic polypeptide
HVASTAESWPTSSSTCAPSLWASCPTTWLTASTARPSWRPASRWR

SEQ ID NO: 17875 - protein, 93 aa, Artificial Sequence
  Synthetic polypeptide
TYVLQLKPAETMEHAYVLKKYIQDEYLPYVFVSFAYLCVMPRQHGVLVNSQCLGVEQDAKQAQNNMSHPQLNPGQRLPLPVRHRCGHHVLLHG

SEQ ID NO: 17876 - protein, 41 aa, Artificial Sequence
  Synthetic polypeptide
DLGSWPTSSSTCAPSLWASCPTTWLTASTARPSWRPASRWR

SEQ ID NO: 17877 - protein, 175 aa, Artificial Sequence
  Synthetic polypeptide
KALASQSFDLNHQELPHLPTVRSGILANVFLYLCAIAVGIMSYYMADRKHRKAFLEARQSLEVKMNLEEQSQQQENLMLSILPKHVADEMLKDMKKDESQKDQQQFNTMYMYRHENVSILFADIVGFTQLSSACSAQELVKLLNELFARFDKLAAKYHQLRIKILGDCYYCICGL

SEQ ID NO: 17878 - protein, 943 aa, Artificial Sequence
  Synthetic polypeptide
KALASQSFDLNHQELPHLPTVRSGILANVFLYLCAIAVGIMSYYMADRKHRKAFLEARQSLEVKMNLEEQSQQQENLMLSILPKHVADEMLKDMKKDESQKDQQQFNTMYMYRHENVSILFADIVGFTQLSSACSAQELVKLLNELFARFDKLAAKYHQLRIKILGDCYYCICGLPDYREDHAVCSILMGLAMVEAISYVREKTKTGVDMRVGVHTGTVLGGVLGQKRWQYDVWSTDVTVANKMEAGGIPGRVHISQSTMDCLKGEFDVEPGDGGSRCDYLEEKGIETYLIIASKPEVKKTATQNGLNGSALPNGAPASSKSSSPALIETKEPNGSAHSSGSTSEKPEEQDAQADNPSFPNPRRRLRLQDLADRVVDASEDEHELNQLLNEALLERESAQVVKKRNTFLLSMRFMDPEMETRYSVEKEKQSGAAFSCSCVVLLCTALVEILIDPWLMTNYVTFMVGEILLLILTICSLAAIFPRAFPKKLVAFSTWIDRTRWARNTWAMLAIFILVMANVVDMLSCLQYYTGPSNATAGMETEGSCLENPKYYNYVAVLSLIATIMLVQVSHMVKLTLMLLVAGAVATINLYAWRPVFDEYDHKRFREHDLPMVALEQMQGFNPGLNGTDRLPLVPSKYSMTVMVFLMMLSFYYFSRHVEKLARTLFLWKIEVHDQKERVYEMRRWNEALVTNMLPEHVARHFLGSKKRDEELYSQTYDEIGVMFASLPNFADFYTEESINNGGIECLRFLNEIISDFDSLLDNPKFRVITKIKTIGSTYMAASGVTPDVNTNGFASSNKEDKSERERWQHLADLADFALAMKDTLTNINNQSFNNFMLRIGMNKGGVLAGVIGARKPHYDIWGNTVNVASRMESTGVMGNIQVVEETQVILREYGFRFVRRGPIFVKGKGELLTFFLKGRDKLATFPNGPSVTLPHQVVDNS

SEQ ID NO: 17879 - protein, 45 aa, Artificial Sequence
  Synthetic polypeptide
STGVTVIRLEPPGAPPLTNCEIWDPGQRLPLPVRHRCGHHVLLHG

SEQ ID NO: 17880 - protein, 365 aa, Artificial Sequence
  Synthetic polypeptide
GAPLHGHPVWEVRSASARPLFVWEVRSASARPLFVWEKSPAKKLSHAISKSLGCVPTREPPHPVFPEQPEKPLDLAHIVPPRPLTNMNDTMVSHMSSGVPTPTKRLQYSQDIPSHLADEHALIASYVARLQHCARVLDSPSRLDEEHRLIARYAARLAAEAGNVTRPPTDLSFNFDANKQQRQLIAELENKNREILQEIQRLRLEHEQASQPTPEKAQQNPTLLAELRLLRQRKDELEQRMSALQESRRELMVQLEELMKLLKAQATGSPHTSPTHGGGRPMPMPVRSTSAGSTPTHCPQDSLSGVGGDVQEAFAQGTRRNLRNDLLVAADSITNTMSSLVKELHSAEEGAEEEEEKMQNGKDRG

SEQ ID NO: 17881 - protein, 347 aa, Artificial Sequence
  Synthetic polypeptide
GAPLHGHPVWEVRSASARPLFVWEVRSASARPLFVWEKSPAKKLSHAISKSLGCVPTREPPHPVFPEQPEKPLDLAHIVPPRPLTNMNDTMVSHMSSGVPTPTKRLQYSQDIPSHLADEHALIASYVARLQHCARVLDSPSRLDEEHRLIARYAARLAAEAGNVTRPPTDLSFNFDANKQQRQLIAELENKNREILQEIQRLRLEHEQASQPTPEKAQQNPTLLAELRLLRQRKDELEQRMSALQESRRELMVQLEELMKLLKAQATGSPHTSPTHGGGRPMPMPVRSTSAGSTPTHCPQDSLSGVGGDVQEAFAQGTRRNLRNDLLVAADSITNTMSSLVKELHSG

SEQ ID NO: 17882 - protein, 342 aa, Artificial Sequence
  Synthetic polypeptide
GAPLHGHPVWEVRSASARPLFVWEVRSASARPLFVWEKSPAKKLSHAISKSLGCVPTREPPHPVFPEQPEKPLDLAHIVPPRPLTNMNDTMVSHMSSGVPTPTKRLQYSQDIPSHLADEHALIASYVARLQHCARVLDSPSRLDEEHRLIARYAARLAAEAGNVTRPPTDLSFNFDANKQQRQLIAELENKNREILQEIQRLRLEHEQASQPTPEKAQQNPTLLAELRLLRQRKDELEQRMSALQESRRELMVQLEELMKLLKEAEARESAQATGSPHTSPTHGGGRPMPMPVRSTSAGSTPTHCPQDSLSGVGGDVQEAFAQAEEGAEEEEEKMQNGKDRG

SEQ ID NO: 17883 - protein, 342 aa, Artificial Sequence
  Synthetic polypeptide
GAPLHGHPVWEVRSASARPLFVWEVRSASARPLFVWEKSPAKKLSHAISKSLGCVPTREPPHPVFPEQPEKPLDLAHIVPPRPLTNMNDTMVSHMSSGVPTPTKRLQYSQDIPSHLADEHALIASYVARLQHCARVLDSPSRLDEEHRLIARYAARLAAEAGNVTRPPTDLSFNFDANKQQRQLIAELENKNREILQEIQRLRLEHEQASQPTPEKAQQNPTLLAELRLLRQRKDELEQRMSALQESRRELMVQLEELMKLLKEEEQKQAAQATGSPHTSPTHGGGRPMPMPVRSTSAGSTPTHCPQDSLSGVGGDVQEAFAQAEEGAEEEEEKMQNGKDRG

SEQ ID NO: 17884 - protein, 372 aa, Artificial Sequence
  Synthetic polypeptide
GAPLHGHPVWEVRSASARPLFVWEVRSASARPLFVWEKSPAKKLSHAISKSLGCVPTREPPHPVFPEQPEKPLDLAHIVPPRPLTNMNDTMVSHMSSGVPTPTKRLQYSQDIPSHLADEHALIASYVARLQHCARVLDSPSRLDEEHRLIARYAARLAAEAGNVTRPPTDLSFNFDANKQQRQLIAELENKNREILQEIQRLRLEHEQASQPTPEKAQQNPTLLAELRLLRQRKDELEQRMSALQESRRELMVQLEELMKLLKEEEQKQAAQATGSPHTSPTHGGGRPMPMPVRSTSAGSTPTHCPQDSLSGVGGDVQEAFAQGTRRNLRNDLLVAADSITNTMSSLVKELHSAEEGAEEEEEKMQNGKDRG

SEQ ID NO: 17885 - protein, 354 aa, Artificial Sequence
  Synthetic polypeptide
GAPLHGHPVWEVRSASARPLFVWEVRSASARPLFVWEKSPAKKLSHAISKSLGCVPTREPPHPVFPEQPEKPLDLAHIVPPRPLTNMNDTMVSHMSSGVPTPTKRLQYSQDIPSHLADEHALIASYVARLQHCARVLDSPSRLDEEHRLIARYAARLAAEAGNVTRPPTDLSFNFDANKQQRQLIAELENKNREILQEIQRLRLEHEQASQPTPEKAQQNPTLLAELRLLRQRKDELEQRMSALQESRRELMVQLEELMKLLKEEEQKQAAQATGSPHTSPTHGGGRPMPMPVRSTSAGSTPTHCPQDSLSGVGGDVQEAFAQGTRRNLRNDLLVAADSITNTMSSLVKELHSG

SEQ ID NO: 17886 - protein, 305 aa, Artificial Sequence
  Synthetic polypeptide
GAPLHGHPVWEVRSASARPLFVWEVRSASARPLFVWEKSPAKKLSHAISKSLGCVPTREPPHPVFPEQPEKPLDLAHIVPPRPLTNMNDTMVSHMSSGVPTPTKSVLDSPSRLDEEHRLIARYAARLAAEAGNVTRPPTDLSFNFDANKQQRQLIAELENKNREILQEIQRLRLEHEQASQPTPEKAQQNPTLLAELRLLRQRKDELEQRMSALQESRRELMVQLEELMKLLKAQATGSPHTSPTHGGGRPMPMPVRSTSAGSTPTHCPQDSLSGVGGDVQEAFAQAEEGAEEEEEKMQNGKDRG

SEQ ID NO: 17887 - protein, 335 aa, Artificial Sequence
  Synthetic polypeptide
GAPLHGHPVWEVRSASARPLFVWEVRSASARPLFVWEKSPAKKLSHAISKSLGCVPTREPPHPVFPEQPEKPLDLAHIVPPRPLTNMNDTMVSHMSSGVPTPTKSVLDSPSRLDEEHRLIARYAARLAAEAGNVTRPPTDLSFNFDANKQQRQLIAELENKNREILQEIQRLRLEHEQASQPTPEKAQQNPTLLAELRLLRQRKDELEQRMSALQESRRELMVQLEELMKLLKAQATGSPHTSPTHGGGRPMPMPVRSTSAGSTPTHCPQDSLSGVGGDVQEAFAQGTRRNLRNDLLVAADSITNTMSSLVKELHSAEEGAEEEEEKMQNGKDRG

SEQ ID NO: 17888 - protein, 312 aa, Artificial Sequence
  Synthetic polypeptide
GAPLHGHPVWEVRSASARPLFVWEVRSASARPLFVWEKSPAKKLSHAISKSLGCVPTREPPHPVFPEQPEKPLDLAHIVPPRPLTNMNDTMVSHMSSGVPTPTKSVLDSPSRLDEEHRLIARYAARLAAEAGNVTRPPTDLSFNFDANKQQRQLIAELENKNREILQEIQRLRLEHEQASQPTPEKAQQNPTLLAELRLLRQRKDELEQRMSALQESRRELMVQLEELMKLLKEEEQKQAAQATGSPHTSPTHGGGRPMPMPVRSTSAGSTPTHCPQDSLSGVGGDVQEAFAQAEEGAEEEEEKMQNGKDRG

SEQ ID NO: 17889 - protein, 60 aa, Artificial Sequence
  Synthetic polypeptide
GAPLPGCPVWEVRSTSARPPRLGGEERLCPAALRLGGEERLCPAALRLGEISCKEAEPCN

SEQ ID NO: 17890 - protein, 18 aa, Artificial Sequence
  Synthetic polypeptide
GAPLPGRSSSGRNLLQRS

SEQ ID NO: 17891 - protein, 17 aa, Artificial Sequence
  Synthetic polypeptide
ALSLWDLMLSPVRAEAS

SEQ ID NO: 17892 - protein, 42 aa, Artificial Sequence
  Synthetic polypeptide
VTAYYLLLISEVGSSLAGMSPQPVGSDAISSEGRGKLTVFSV

SEQ ID NO: 17893 - protein, 59 aa, Artificial Sequence
  Synthetic polypeptide
VTAYYLLLISEVGSSLAGMSPQPVGSDAISSEGRGKLTVFSVKAMLATMCGGKMLDKLR

SEQ ID NO: 17894 - protein, 98 aa, Artificial Sequence
  Synthetic polypeptide
VTAYYLLLISEVGSSLAGMSPQPVGSDAISSEGRGKLTVFSVKAMLATMCGGKMLDKLRYVFSQMSDSNGLMIFSKFDQFLKEVLKLPTAVFEGPSFG

SEQ ID NO: 17895 - protein, 512 aa, Artificial Sequence
  Synthetic polypeptide
VTAYYLLLISEVGSSLAGMSPQPVGSDAISSEGRGKLTVFSVKAMLATMCGGKMLDKLRYVFSQMSDSNGLMIFSKFDQFLKEVLKLPTAVFEGPSFGYTEHSVRTCFPQQRKIMLNMFLDTMMADPPPQCLVWLPLMHRLAHVENVFHPVECSYCRCESMMGFRYRCQQCHNYQLCQNCFWRGHAGGPHSNQHQMKEHSSWKSPAKKLSHAISKSLGCVPTREPPHPVFPEQPEKPLDLAHIVPPRPLTNMNDTMVSHMSSGVPTPTKRLQYSQDIPSHLADEHALIASYVARLQHCARVLDSPSRLDEEHRLIARYAARLAAEAGNVTRPPTDLSFNFDANKQQRQLIAELENKNREILQEIQRLRLEHEQASQPTPEKAQQNPTLLAELRLLRQRKDELEQRMSALQESRRELMVQLEELMKLLKAQATGSPHTSPTHGGGRPMPMPVRSTSAGSTPTHCPQDSLSGVGGDVQEAFAQGTRRNLRNDLLVAADSITNTMSSLVKELHSG

SEQ ID NO: 17896 - protein, 507 aa, Artificial Sequence
  Synthetic polypeptide
VTAYYLLLISEVGSSLAGMSPQPVGSDAISSEGRGKLTVFSVKAMLATMCGGKMLDKLRYVFSQMSDSNGLMIFSKFDQFLKEVLKLPTAVFEGPSFGYTEHSVRTCFPQQRKIMLNMFLDTMMADPPPQCLVWLPLMHRLAHVENVFHPVECSYCRCESMMGFRYRCQQCHNYQLCQNCFWRGHAGGPHSNQHQMKEHSSWKSPAKKLSHAISKSLGCVPTREPPHPVFPEQPEKPLDLAHIVPPRPLTNMNDTMVSHMSSGVPTPTKRLQYSQDIPSHLADEHALIASYVARLQHCARVLDSPSRLDEEHRLIARYAARLAAEAGNVTRPPTDLSFNFDANKQQRQLIAELENKNREILQEIQRLRLEHEQASQPTPEKAQQNPTLLAELRLLRQRKDELEQRMSALQESRRELMVQLEELMKLLKEAEARESAQATGSPHTSPTHGGGRPMPMPVRSTSAGSTPTHCPQDSLSGVGGDVQEAFAQAEEGAEEEEEKMQNGKDRG

SEQ ID NO: 17897 - protein, 507 aa, Artificial Sequence
  Synthetic polypeptide
VTAYYLLLISEVGSSLAGMSPQPVGSDAISSEGRGKLTVFSVKAMLATMCGGKMLDKLRYVFSQMSDSNGLMIFSKFDQFLKEVLKLPTAVFEGPSFGYTEHSVRTCFPQQRKIMLNMFLDTMMADPPPQCLVWLPLMHRLAHVENVFHPVECSYCRCESMMGFRYRCQQCHNYQLCQNCFWRGHAGGPHSNQHQMKEHSSWKSPAKKLSHAISKSLGCVPTREPPHPVFPEQPEKPLDLAHIVPPRPLTNMNDTMVSHMSSGVPTPTKRLQYSQDIPSHLADEHALIASYVARLQHCARVLDSPSRLDEEHRLIARYAARLAAEAGNVTRPPTDLSFNFDANKQQRQLIAELENKNREILQEIQRLRLEHEQASQPTPEKAQQNPTLLAELRLLRQRKDELEQRMSALQESRRELMVQLEELMKLLKEEEQKQAAQATGSPHTSPTHGGGRPMPMPVRSTSAGSTPTHCPQDSLSGVGGDVQEAFAQAEEGAEEEEEKMQNGKDRG

SEQ ID NO: 17898 - protein, 537 aa, Artificial Sequence
  Synthetic polypeptide
VTAYYLLLISEVGSSLAGMSPQPVGSDAISSEGRGKLTVFSVKAMLATMCGGKMLDKLRYVFSQMSDSNGLMIFSKFDQFLKEVLKLPTAVFEGPSFGYTEHSVRTCFPQQRKIMLNMFLDTMMADPPPQCLVWLPLMHRLAHVENVFHPVECSYCRCESMMGFRYRCQQCHNYQLCQNCFWRGHAGGPHSNQHQMKEHSSWKSPAKKLSHAISKSLGCVPTREPPHPVFPEQPEKPLDLAHIVPPRPLTNMNDTMVSHMSSGVPTPTKRLQYSQDIPSHLADEHALIASYVARLQHCARVLDSPSRLDEEHRLIARYAARLAAEAGNVTRPPTDLSFNFDANKQQRQLIAELENKNREILQEIQRLRLEHEQASQPTPEKAQQNPTLLAELRLLRQRKDELEQRMSALQESRRELMVQLEELMKLLKEEEQKQAAQATGSPHTSPTHGGGRPMPMPVRSTSAGSTPTHCPQDSLSGVGGDVQEAFAQGTRRNLRNDLLVAADSITNTMSSLVKELHSAEEGAEEEEEKMQNGKDRG

SEQ ID NO: 17899 - protein, 519 aa, Artificial Sequence
  Synthetic polypeptide
VTAYYLLLISEVGSSLAGMSPQPVGSDAISSEGRGKLTVFSVKAMLATMCGGKMLDKLRYVFSQMSDSNGLMIFSKFDQFLKEVLKLPTAVFEGPSFGYTEHSVRTCFPQQRKIMLNMFLDTMMADPPPQCLVWLPLMHRLAHVENVFHPVECSYCRCESMMGFRYRCQQCHNYQLCQNCFWRGHAGGPHSNQHQMKEHSSWKSPAKKLSHAISKSLGCVPTREPPHPVFPEQPEKPLDLAHIVPPRPLTNMNDTMVSHMSSGVPTPTKRLQYSQDIPSHLADEHALIASYVARLQHCARVLDSPSRLDEEHRLIARYAARLAAEAGNVTRPPTDLSFNFDANKQQRQLIAELENKNREILQEIQRLRLEHEQASQPTPEKAQQNPTLLAELRLLRQRKDELEQRMSALQESRRELMVQLEELMKLLKEEEQKQAAQATGSPHTSPTHGGGRPMPMPVRSTSAGSTPTHCPQDSLSGVGGDVQEAFAQGTRRNLRNDLLVAADSITNTMSSLVKELHSG

SEQ ID NO: 17900 - protein, 470 aa, Artificial Sequence
  Synthetic polypeptide
VTAYYLLLISEVGSSLAGMSPQPVGSDAISSEGRGKLTVFSVKAMLATMCGGKMLDKLRYVFSQMSDSNGLMIFSKFDQFLKEVLKLPTAVFEGPSFGYTEHSVRTCFPQQRKIMLNMFLDTMMADPPPQCLVWLPLMHRLAHVENVFHPVECSYCRCESMMGFRYRCQQCHNYQLCQNCFWRGHAGGPHSNQHQMKEHSSWKSPAKKLSHAISKSLGCVPTREPPHPVFPEQPEKPLDLAHIVPPRPLTNMNDTMVSHMSSGVPTPTKSVLDSPSRLDEEHRLIARYAARLAAEAGNVTRPPTDLSFNFDANKQQRQLIAELENKNREILQEIQRLRLEHEQASQPTPEKAQQNPTLLAELRLLRQRKDELEQRMSALQESRRELMVQLEELMKLLKAQATGSPHTSPTHGGGRPMPMPVRSTSAGSTPTHCPQDSLSGVGGDVQEAFAQAEEGAEEEEEKMQNGKDRG

SEQ ID NO: 17901 - protein, 500 aa, Artificial Sequence
  Synthetic polypeptide
VTAYYLLLISEVGSSLAGMSPQPVGSDAISSEGRGKLTVFSVKAMLATMCGGKMLDKLRYVFSQMSDSNGLMIFSKFDQFLKEVLKLPTAVFEGPSFGYTEHSVRTCFPQQRKIMLNMFLDTMMADPPPQCLVWLPLMHRLAHVENVFHPVECSYCRCESMMGFRYRCQQCHNYQLCQNCFWRGHAGGPHSNQHQMKEHSSWKSPAKKLSHAISKSLGCVPTREPPHPVFPEQPEKPLDLAHIVPPRPLTNMNDTMVSHMSSGVPTPTKSVLDSPSRLDEEHRLIARYAARLAAEAGNVTRPPTDLSFNFDANKQQRQLIAELENKNREILQEIQRLRLEHEQASQPTPEKAQQNPTLLAELRLLRQRKDELEQRMSALQESRRELMVQLEELMKLLKAQATGSPHTSPTHGGGRPMPMPVRSTSAGSTPTHCPQDSLSGVGGDVQEAFAQGTRRNLRNDLLVAADSITNTMSSLVKELHSAEEGAEEEEEKMQNGKDRG

SEQ ID NO: 17902 - protein, 477 aa, Artificial Sequence
  Synthetic polypeptide
VTAYYLLLISEVGSSLAGMSPQPVGSDAISSEGRGKLTVFSVKAMLATMCGGKMLDKLRYVFSQMSDSNGLMIFSKFDQFLKEVLKLPTAVFEGPSFGYTEHSVRTCFPQQRKIMLNMFLDTMMADPPPQCLVWLPLMHRLAHVENVFHPVECSYCRCESMMGFRYRCQQCHNYQLCQNCFWRGHAGGPHSNQHQMKEHSSWKSPAKKLSHAISKSLGCVPTREPPHPVFPEQPEKPLDLAHIVPPRPLTNMNDTMVSHMSSGVPTPTKSVLDSPSRLDEEHRLIARYAARLAAEAGNVTRPPTDLSFNFDANKQQRQLIAELENKNREILQEIQRLRLEHEQASQPTPEKAQQNPTLLAELRLLRQRKDELEQRMSALQESRRELMVQLEELMKLLKEEEQKQAAQATGSPHTSPTHGGGRPMPMPVRSTSAGSTPTHCPQDSLSGVGGDVQEAFAQAEEGAEEEEEKMQNGKDRG

SEQ ID NO: 17903 - protein, 11 aa, Artificial Sequence
  Synthetic polypeptide
GRWWRASVPAT

SEQ ID NO: 17904 - protein, 93 aa, Artificial Sequence
  Synthetic polypeptide
QGGGGELQFQQLDFQFDWKLINVFFSNASQCYLCPSAQQAPSLSTVLLSQNGLAAGGVDELMGVLDYLQQEVPRAFVNLVDLSEVAEVSRQYH

SEQ ID NO: 17905 - protein, 1301 aa, Artificial Sequence
  Synthetic polypeptide
QGGGGELQFQQLDFQFDWKLINVFFSNASQCYLCPSAQQAPSLSTVLLSQNGLAAGGVDELMGVLDYLQQEVPRAFVNLVDLSEVAEVSRQYHGTWLSPAPEPCNCSEETTRLAKVVMQWSYQEAWNSLLASSRYSEQESFTVVFQPFFYETTPSLHSEDPRLQDSTTLAWHLWNRMMEPAGEKDEPLSVKHGRPMKCPSQESPYLFSYRNSNYLTRLQKPQDKLEVREGAEIRCPDKDPSDTVPTSVHRLKPADINVIGALGDSLTAGNGAGSTPGNVLDVLTQYRGLSWSVGGDENIGTVTTLANILREFNPSLKGFSVGTGKETSPNAFLNQAVAGGRAEDLPVQARRLVDLMKNDTRIHFQEDWKIITLFIGGNDLCDFCNDLVPRAFVNLVTVLEIVNLRELYQEKKVYCPRMILRSLCPCVLKFDDNSTELATLIEFNKKFQEKTHQLIESGRYDTREDFTVVVQPFFENVDMPKTSEGLPDNSFFAPDCFHFSSKSHSRAASALWNNMLEPVGQKTTRHKFENKINITCPNQVQPFLRTYKNSMQGHGTWLPCRDRAPSALHPTSVHALRPADIQVVAALGDSLTAGNGIGSKPDDLPDVTTQYRGLSYSAGGDGSLENVTTLPNILREFNRNLTGYAVGTGDANDTNAFLNQAVPGAKAEDLMSQVQTLMQKMKDDHRVNFHEDWKVITVLIGGSDLCDYCTDSNLYSAANFVHHLRNALDVLHREVPRVLVNLVDFLNPTIMRQVFLGNPDKCPVQQASVLCNCVLTLRENSQELARLEAFSRAYRSSMRELVGSGRYDTQEDFSVVLQPFFQNIQLPVLADGLPDTSFFAPDCIHPNQKFHSQLARALWTNMLEPLGSKTETLDLRAEMPITCPTQNEPFLRTPRNSNYTYPIKPAIENWGSDFLCTEWKASNSVPTSVHQLRPADIKVVAALGDSLTTAVGARPNNSSDLPTSWRGLSWSIGGDGNLETHTTLPNILKKFNPYLLGFSTSTWEGTAGLNVAAEGARARDMPAQAWDLVERMKNSPDINLEKDWKLVTLFIGVNDLCHYCENPEAHLATEYVQHIQQALDILSEELPRAFVNVVEVMELASLYQGQGGKCAMLAAQNNCTCLRHSQSSLEKQELKKVNWNLQHGISSFSYWHQYTQREDFAVVVQPFFQNTLTPLNERGDTDLTFFSEDCFHFSDRGHAEMAIALWNNMLEPVGRKTTSNNFTHSRAKLKCPSPESPYLYTLRNSRLLPDQAEEAPEVLYWAVPVAAGVGLVVGIIGTVVWRCRRGGRREDPPMSLRTVAL

SEQ ID NO: 17906 - protein, 1312 aa, Artificial Sequence
  Synthetic polypeptide
QGGGGELQFQQLDFQFDWKLINVFFSNASQCYLCPSAQQNGLAAGGVDELMGVLDYLQQEVPRAFVNLVDLSEVAEVSRQYHGTWLSPAPEPCNCSEETTRLAKVVMQWSYQEAWNSLLASSRYSEQESFTVVFQPFFYETTPSLHSEDPRLQDSTTLAWHLWNRMMEPAGEKDEPLSVKHGRPMKCPSQESPYLFSYRNSNYLTRLQKPQDKLEVREGAEIRCPDKDPSDTVPTSVHRLKPADINVIGALGDSLTAGNGAGSTPGNVLDVLTQYRGLSWSVGGDENIGTVTTLANILREFNPSLKGFSVGTGKETSPNAFLNQAVAGGRAEDLPVQARRLVDLMKNDTRIHFQEDWKIITLFIGGNDLCDFCNDLVHYSPQNFTDNIGKALDILHAEVPRAFVNLVTVLEIVNLRELYQEKKVYCPRMILRSLCPCVLKFDDNSTELATLIEFNKKFQEKTHQLIESGRYDTREDFTVVVQPFFENVDMPKTSEGLPDNSFFAPDCFHFSSKSHSRAASALWNNMLEPVGQKTTRHKFENKINITCPNQVQPFLRTYKNSMQGHGTWLPCRDRAPSALHPTSVHALRPADIQVVAALGDSLTAGNGIGSKPDDLPDVTTQYRGLSYSAGGDGSLENVTTLPNILREFNRNLTGYAVGTGDANDTNAFLNQAVPGAKAEDLMSQVQTLMQKMKDDHRVNFHEDWKVITVLIGGSDLCDYCTDSNLYSAANFVHHLRNALDVLHREVPRVLVNLVDFLNPTIMRQVFLGNPDKCPVQQASVLCNCVLTLRENSQELARLEAFSRAYRSSMRELVGSGRYDTQEDFSVVLQPFFQNIQLPVLADGLPDTSFFAPDCIHPNQKFHSQLARALWTNMLEPLGSKTETLDLRAEMPITCPTQNEPFLRTPRNSNYTYPIKPAIENWGSDFLCTEWKASNSVPTSVHQLRPADIKVVAALGDSLTTAVGARPNNSSDLPTSWRGLSWSIGGDGNLETHTTLPNILKKFNPYLLGFSTSTWEGTAGLNVAAEGARARDMPAQAWDLVERMKNSPDINLEKDWKLVTLFIGVNDLCHYCENPEAHLATEYVQHIQQALDILSEELPRAFVNVVEVMELASLYQGQGGKCAMLAAQNNCTCLRHSQSSLEKQELKKVNWNLQHGISSFSYWHQYTQREDFAVVVQPFFQNTLTPLNERGDTDLTFFSEDCFHFSDRGHAEMAIALWNNMLEPVGRKTTSNNFTHSRAKLKCPSPESPYLYTLRNSRLLPDQAEEAPEVLYWAVPVAAGVGLVVGIIGTVVWRCRRGGRREDPPMSLRTVAL

SEQ ID NO: 17907 - protein, 60 aa, Artificial Sequence
  Synthetic polypeptide
REVVESFSSSNLTFNLTGSSSMCSSVMQASVTCAPLLNRHPHLARFSSHRMGLRRAAWMS

SEQ ID NO: 17908 - protein, 49 aa, Artificial Sequence
  Synthetic polypeptide
REVVESFSSSNLTFNLTGSSSMCSSVMQASVTCAPLLNRMGLRRAAWMS

SEQ ID NO: 17909 - protein, 10 aa, Artificial Sequence
  Synthetic polypeptide
ITDGASRRER

SEQ ID NO: 17910 - protein, 489 aa, Artificial Sequence
  Synthetic polypeptide
QMEPAGEKDEPLSVKHGRPMKCPSQESPYLFSYRNSNYLTRLQKPQDKLEVREGAEIRCPDKDPSDTVPTSVHRLKPADINVIGALGDSLTAGNGAGSTPGNVLDVLTQYRGLSWSVGGDENIGTVTTLANILREFNPSLKGFSVGTGKETSPNAFLNQAVAGGRAEDLPVQARRLVDLMKNDTRIHFQEDWKIITLFIGGNDLCDFCNDLVHYSPQNFTDNIGKALDILHAEVPRAFVNLVTVLEIVNLRELYQEKKVYCPRMILRSLCPCVLKFDDNSTELATLIEFNKKFQEKTHQLIESGRYDTREDFTVVVQPFFENVDMPKTSEGLPDNSFFAPDCFHFSSKSHSRAASALWNNMLEPVGQKTTRHKFENKINITCPNQVQPFLRTYKNSMQGHGTWLPCRDRAPSALHPTSVHALRPADIQVVAALGDSLTAGNGIGSKPDDLPDVTTQYRGLSYRESKPGFLSDSWVSKSNRKCTRKAPNP

SEQ ID NO: 17911 - protein, 1147 aa, Artificial Sequence
  Synthetic polypeptide
QMEPAGEKDEPLSVKHGRPMKCPSQESPYLFSYRNSNYLTRLQKPQDKLEVREGAEIRCPDKDPSDTVPTSVHRLKPADINVIGALGDSLTAGNGAGSTPGNVLDVLTQYRGLSWSVGGDENIGTVTTLANILREFNPSLKGFSVGTGKETSPNAFLNQAVAGGRAEDLPVQARRLVDLMKNDTRIHFQEDWKIITLFIGGNDLCDFCNDLVHYSPQNFTDNIGKALDILHAEVPRAFVNLVTVLEIVNLRELYQEKKVYCPRMILRSLCPCVLKFDDNSTELATLIEFNKKFQEKTHQLIESGRYDTREDFTVVVQPFFENVDMPKTSEGLPDNSFFAPDCFHFSSKSHSRAASALWNNMLEPVGQKTTRHKFENKINITCPNQVQPFLRTYKNSMQGHGTWLPCRDRAPSALHPTSVHALRPADIQVVAALGDSLTAGNGIGSKPDDLPDVTTQYRGLSYSAGGDGSLENVTTLPNILREFNRNLTGYAVGTGDANDTNAFLNQAVPGAKAEDLMSQVQTLMQKMKDDHRVNFHEDWKVITVLIGGSDLCDYCTDSNLYSAANFVHHLRNALDVLHREVPRVLVNLVDFLNPTIMRQVFLGNPDKCPVQQASVLCNCVLTLRENSQELARLEAFSRAYRSSMRELVGSGRYDTQEDFSVVLQPFFQNIQLPVLADGLPDTSFFAPDCIHPNQKFHSQLARALWTNMLEPLGSKTETLDLRAEMPITCPTQNEPFLRTPRNSNYTYPIKPAIENWGSDFLCTEWKASNSVPTSVHQLRPADIKVVAALGDSLTTAVGARPNNSSDLPTSWRGLSWSIGGDGNLETHTTLPNILKKFNPYLLGFSTSTWEGTAGLNVAAEGARARDMPAQAWDLVERMKNSPDINLEKDWKLVTLFIGVNDLCHYCENPEAHLATEYVQHIQQALDILSEELPRAFVNVVEVMELASLYQGQGGKCAMLAAQNNCTCLRHSQSSLEKQELKKVNWNLQHGISSFSYWHQYTQREDFAVVVQPFFQNTLTPLNERGDTDLTFFSEDCFHFSDRGHAEMAIALWNNMLEPVGRKTTSNNFTHSRAKLKCPSPESPYLYTLRNSRLLPDQAEEAPEVLYWAVPVAAGVGLVVGIIGTVVWRCRRGGRREDPPMSLRTVAL

SEQ ID NO: 17912 - protein, 1125 aa, Artificial Sequence
  Synthetic polypeptide
QMEPAGEKDEPLSVKHGRPMKCPSQESPYLFSYRNSNYLTRLQKPQDKLEVREGAEIRCPDKDPSDTVPTSVHRLKPADINVIGALGDSLTAGNGAGSTPGNVLDVLTQYRGLSWSVGGDENIGTVTTLANILREFNPSLKGFSVGTGKETSPNAFLNQAVAGGRAEDLPVQARRLVDLMKNDTRIHFQEDWKIITLFIGGNDLCDFCNDLVPRAFVNLVTVLEIVNLRELYQEKKVYCPRMILRSLCPCVLKFDDNSTELATLIEFNKKFQEKTHQLIESGRYDTREDFTVVVQPFFENVDMPKTSEGLPDNSFFAPDCFHFSSKSHSRAASALWNNMLEPVGQKTTRHKFENKINITCPNQVQPFLRTYKNSMQGHGTWLPCRDRAPSALHPTSVHALRPADIQVVAALGDSLTAGNGIGSKPDDLPDVTTQYRGLSYSAGGDGSLENVTTLPNILREFNRNLTGYAVGTGDANDTNAFLNQAVPGAKAEDLMSQVQTLMQKMKDDHRVNFHEDWKVITVLIGGSDLCDYCTDSNLYSAANFVHHLRNALDVLHREVPRVLVNLVDFLNPTIMRQVFLGNPDKCPVQQASVLCNCVLTLRENSQELARLEAFSRAYRSSMRELVGSGRYDTQEDFSVVLQPFFQNIQLPVLADGLPDTSFFAPDCIHPNQKFHSQLARALWTNMLEPLGSKTETLDLRAEMPITCPTQNEPFLRTPRNSNYTYPIKPAIENWGSDFLCTEWKASNSVPTSVHQLRPADIKVVAALGDSLTTAVGARPNNSSDLPTSWRGLSWSIGGDGNLETHTTLPNILKKFNPYLLGFSTSTWEGTAGLNVAAEGARARDMPAQAWDLVERMKNSPDINLEKDWKLVTLFIGVNDLCHYCENPEAHLATEYVQHIQQALDILSEELPRAFVNVVEVMELASLYQGQGGKCAMLAAQNNCTCLRHSQSSLEKQELKKVNWNLQHGISSFSYWHQYTQREDFAVVVQPFFQNTLTPLNERGDTDLTFFSEDCFHFSDRGHAEMAIALWNNMLEPVGRKTTSNNFTHSRAKLKCPSPESPYLYTLRNSRLLPDQAEEAPEVLYWAVPVAAGVGLVVGIIGTVVWRCRRGGRREDPPMSLRTVAL

SEQ ID NO: 17913 - protein, 13 aa, Artificial Sequence
  Synthetic polypeptide
YNRWSQQERKMSH

SEQ ID NO: 17914 - protein, 254 aa, Artificial Sequence
  Synthetic polypeptide
ESYSTTLSLGFLISKTGIMRIPLLEWLGGLNRSLCPCVLKFDDNSTELATLIEFNKKFQEKTHQLIESGRYDTREDFTVVVQPFFENVDMPKTSEGLPDNSFFAPDCFHFSSKSHSRAASALWNNMLEPVGQKTTRHKFENKINITCPNQVQPFLRTYKNSMQGHGTWLPCRDRAPSALHPTSVHALRPADIQVVAALGDSLTAGNGIGSKPDDLPDVTTQYRGLSYRESKPGFLSDSWVSKSNRKCTRKAPNP

SEQ ID NO: 17915 - protein, 912 aa, Artificial Sequence
  Synthetic polypeptide
ESYSTTLSLGFLISKTGIMRIPLLEWLGGLNRSLCPCVLKFDDNSTELATLIEFNKKFQEKTHQLIESGRYDTREDFTVVVQPFFENVDMPKTSEGLPDNSFFAPDCFHFSSKSHSRAASALWNNMLEPVGQKTTRHKFENKINITCPNQVQPFLRTYKNSMQGHGTWLPCRDRAPSALHPTSVHALRPADIQVVAALGDSLTAGNGIGSKPDDLPDVTTQYRGLSYSAGGDGSLENVTTLPNILREFNRNLTGYAVGTGDANDTNAFLNQAVPGAKAEDLMSQVQTLMQKMKDDHRVNFHEDWKVITVLIGGSDLCDYCTDSNLYSAANFVHHLRNALDVLHREVPRVLVNLVDFLNPTIMRQVFLGNPDKCPVQQASVLCNCVLTLRENSQELARLEAFSRAYRSSMRELVGSGRYDTQEDFSVVLQPFFQNIQLPVLADGLPDTSFFAPDCIHPNQKFHSQLARALWTNMLEPLGSKTETLDLRAEMPITCPTQNEPFLRTPRNSNYTYPIKPAIENWGSDFLCTEWKASNSVPTSVHQLRPADIKVVAALGDSLTTAVGARPNNSSDLPTSWRGLSWSIGGDGNLETHTTLPNILKKFNPYLLGFSTSTWEGTAGLNVAAEGARARDMPAQAWDLVERMKNSPDINLEKDWKLVTLFIGVNDLCHYCENPEAHLATEYVQHIQQALDILSEELPRAFVNVVEVMELASLYQGQGGKCAMLAAQNNCTCLRHSQSSLEKQELKKVNWNLQHGISSFSYWHQYTQREDFAVVVQPFFQNTLTPLNERGDTDLTFFSEDCFHFSDRGHAEMAIALWNNMLEPVGRKTTSNNFTHSRAKLKCPSPESPYLYTLRNSRLLPDQAEEAPEVLYWAVPVAAGVGLVVGIIGTVVWRCRRGGRREDPPMSLRTVAL

SEQ ID NO: 17916 - protein, 26 aa, Artificial Sequence
  Synthetic polypeptide
NRDNENTTSRMAGRTKQVSVSLCPEV

SEQ ID NO: 17917 - protein, 8 aa, Artificial Sequence
  Synthetic polypeptide
TGLCVPVS

SEQ ID NO: 17918 - protein, 23 aa, Artificial Sequence
  Synthetic polypeptide
DQPGQHVETPSLLRIQKLAGYSD

SEQ ID NO: 17919 - protein, 103 aa, Artificial Sequence
  Synthetic polypeptide
LGIVIKMFYEEHLHLDDEIRYILDGSGYFDVRDKEDQWIRIFMEKGDMVTLPAGIYHRFTVDEKNYTKAMRLFVGEPVWTAYNRPADHFEARGQYVKFLAQTA

SEQ ID NO: 17920 - protein, 25 aa, Artificial Sequence
  Synthetic polypeptide
CCNHGQNQPSSQLIHLHVGSYQTAL

SEQ ID NO: 17921 - protein, 20 aa, Artificial Sequence
  Synthetic polypeptide
ILGPPQTNAVTMGRTNHHHS

SEQ ID NO: 17922 - protein, 582 aa, Artificial Sequence
  Synthetic polypeptide
PWAEPTIITVDPPACGELSNCTLTGKDCINGFKRDHNGCRTCQCINTEELCSERKQGCTLNCPFGFLTDAQNCEICECRPRPKKCRPIICDKYCPLGLLKNKHGCDICRCKKCPELSCSKICPLGFQQDSHGCLICKCREASASAGPPILSGTCLTVDGHHHKNEESWHDGCRECYCLNGREMCALITCPVPACGNPTIHPGQCCPSCADDFVVQKPELSTPSICHAPGGEYFVEGETWNIDSCTQCTCHSGRVLCETEVCPPLLCQNPSRTQDSCCPQCTDQPFRPSLSRNNSVPNYCKNDEGDIFLAAESWKPDVCTSCICIDSVISCFSESCPSVSCERPVLRKGQCCPYCIEDTIPKKVVCHFSGKAYADEERWDLDSCTHCYCLQGQTLCSTVSCPPLPCVEPINVEGSCCPMCPEMYVPEPTNIPIEKTNHRGEVDLEVPLWPTPSENDIVHLPRDMGHLQVDYRDNRLHPSEDSSLDSIASVVVPIIICLSIIIAFLFINQKKQWIPLLCWYRTPTKPSSLNNQLVSVDCKKGTRVQVDSSQRMLRIAEPDARFSGFYSMQKQNHLQADNFYQTV

SEQ ID NO: 17923 - protein, 26 aa, Artificial Sequence
  Synthetic polypeptide
CRRHNSKEGGVPLQWEGLCRRGAVGP

SEQ ID NO: 17924 - protein, 140 aa, Artificial Sequence
  Synthetic polypeptide
LNLVPHFSVELKQYPDPLGNGDQMALMQKTQFQRRWCATSVGRPMPTRSGGTLTAAPTATACRARPSARPSAAPLCPVLSPSTWKEVAAQCVQKCMSQNQPIYPLRRQTIEERLTWRFPCGPRLVKMISSISLEIWVTSR

SEQ ID NO: 17925 - protein, 239 aa, Artificial Sequence
  Synthetic polypeptide
PIGQWRSNGIDAEDTIPKKVVCHFSGKAYADEERWDLDSCTHCYCLQGQTLCSTVSCPPLPCVEPINVEGSCCPMCPEMYVPEPTNIPIEKTNHRGEVDLEVPLWPTPSENDIVHLPRDMGHLQVDYRDNRLHPSEDSSLDSIASVVVPIIICLSIIIAFLFINQKKQWIPLLCWYRTPTKPSSLNNQLVSVDCKKGTRVQVDSSQRMLRIAEPDARFSGFYSMQKQNHLQADNFYQTV

SEQ ID NO: 17926 - protein, 29 aa, Artificial Sequence
  Synthetic polypeptide
IQKRNNKAKSWFAVWGKGGEFAPSWDCKP

SEQ ID NO: 17927 - protein, 33 aa, Artificial Sequence
  Synthetic polypeptide
IQKRNNKAKSWFAVWGKGGEFAPSWDCKPGMYV

SEQ ID NO: 17928 - protein, 51 aa, Artificial Sequence
  Synthetic polypeptide
RMNNKINLKKAERNNRSKMKINKYRKEIIKPKAGLLCGGREENLHHPGIVN

SEQ ID NO: 17929 - protein, 304 aa, Artificial Sequence
  Synthetic polypeptide
RMNNKINLKKAERNNRSKMKINKYRKEIIKPKAGLLCGGREENLHHPGIVNLECMFETPERVFVVMEKLHGDMLEMILSSEKSRLPERITKFMVTQILVALRNLHFKNIVHCDLKPENVLLASAEPFPQVKLCDFGFARIIGEKSFRRSVVGTPAYLAPEVLRSKGYNRSLDMWSVGVIIYVSLSGTFPFNEDEDINDQIQNAAFMYPPNPWREISGEAIDLINNLLQVKMRKRYSVDKSLSHPWLQDYQTWLDLREFETRIGERYITHESDDARWEIHAYTHNLVYPKHFIMAPNPDDMEEDP

SEQ ID NO: 17930 - protein, 20 aa, Artificial Sequence
  Synthetic polypeptide
SQKLVCCVGEGRRICTILGL

SEQ ID NO: 17931 - protein, 165 aa, Artificial Sequence
  Synthetic polypeptide
GLARWLTPVIPALWEAEAGGSRALATVEDFQIRPHTLYVHSYKAPTFCDYCGEMLWGLVRQGLKCEGCGLNYHKRCAFKIPNNCSGVRKRRLSNVSLPGPGLSVPRPLQPEYVALPSEESHVHQEPSKRIPSWSGRPIWMEKMVMCRVKVPHTFAVHSYTRPTIC

SEQ ID NO: 17932 - protein, 770 aa, Artificial Sequence
  Synthetic polypeptide
GLARWLTPVIPALWEAEAGGSRALATVEDFQIRPHTLYVHSYKAPTFCDYCGEMLWGLVRQGLKCEGCGLNYHKRCAFKIPNNCSGVRKRRLSNVSLPGPGLSVPRPLQPEYVALPSEESHVHQEPSKRIPSWSGRPIWMEKMVMCRVKVPHTFAVHSYTRPTICQYCKRLLKGLFRQGMQCKDCKFNCHKRCASKVPRDCLGEVTFNGEPSSLGTDTDIPMDIDNNDINSDSSRGLDDTEEPSPPEDKMFFLDPSDLDVERDEEAVKTISPSTSNNIPLMRVVQSIKHTKRKSSTMVKEGWMVHYTSRDNLRKRHYWRLDSKCLTLFQNESGSKYYKEIPLSEILRISSPRDFTNISQGSNPHCFEIITDTMVYFVGENNGDSSHNPVLAATGVGLDVAQSWEKAIRQALMPVTPQASVCTSPGQGKDHKDLSTSISVSNCQIQENVDISTVYQIFADEVLGSGQFGIVYGGKHRKTGRDVAIKVIDKMRFPTKQESQLRNEVAILQNLHHPGIVNLECMFETPERVFVVMEKLHGDMLEMILSSEKSRLPERITKFMVTQILVALRNLHFKNIVHCDLKPENVLLASAEPFPQVKLCDFGFARIIGEKSFRRSVVGTPAYLAPEVLRSKGYNRSLDMWSVGVIIYVSLSGTFPFNEDEDINDQIQNAAFMYPPNPWREISGEAIDLINNLLQVKMRKRYSVDKSLSHPWLQDYQTWLDLREFETRIGERYITHESDDARWEIHAYTHNLVYPKHFIMAPNPDDMEEDP

SEQ ID NO: 17933 - protein, 47 aa, Artificial Sequence
  Synthetic polypeptide
PGAVAHACNPSTLGGRGGRITSFSHSRRLPDSSTYSLCTFLQSSYFL

SEQ ID NO: 17934 - protein, 14 aa, Artificial Sequence
  Synthetic polypeptide
SQHFGRPRRADHEL

SEQ ID NO: 17935 - protein, 150 aa, Artificial Sequence
  Synthetic polypeptide
MATVAHTSLATVEDFQIRPHTLYVHSYKAPTFCDYCGEMLWGLVRQGLKCEGCGLNYHKRCAFKIPNNCSGVRKRRLSNVSLPGPGLSVPRPLQPEYVALPSEESHVHQEPSKRIPSWSGRPIWMEKMVMCRVKVPHTFAVHSYTRPTIC

SEQ ID NO: 17936 - protein, 755 aa, Artificial Sequence
  Synthetic polypeptide
MATVAHTSLATVEDFQIRPHTLYVHSYKAPTFCDYCGEMLWGLVRQGLKCEGCGLNYHKRCAFKIPNNCSGVRKRRLSNVSLPGPGLSVPRPLQPEYVALPSEESHVHQEPSKRIPSWSGRPIWMEKMVMCRVKVPHTFAVHSYTRPTICQYCKRLLKGLFRQGMQCKDCKFNCHKRCASKVPRDCLGEVTFNGEPSSLGTDTDIPMDIDNNDINSDSSRGLDDTEEPSPPEDKMFFLDPSDLDVERDEEAVKTISPSTSNNIPLMRVVQSIKHTKRKSSTMVKEGWMVHYTSRDNLRKRHYWRLDSKCLTLFQNESGSKYYKEIPLSEILRISSPRDFTNISQGSNPHCFEIITDTMVYFVGENNGDSSHNPVLAATGVGLDVAQSWEKAIRQALMPVTPQASVCTSPGQGKDHKDLSTSISVSNCQIQENVDISTVYQIFADEVLGSGQFGIVYGGKHRKTGRDVAIKVIDKMRFPTKQESQLRNEVAILQNLHHPGIVNLECMFETPERVFVVMEKLHGDMLEMILSSEKSRLPERITKFMVTQILVALRNLHFKNIVHCDLKPENVLLASAEPFPQVKLCDFGFARIIGEKSFRRSVVGTPAYLAPEVLRSKGYNRSLDMWSVGVIIYVSLSGTFPFNEDEDINDQIQNAAFMYPPNPWREISGEAIDLINNLLQVKMRKRYSVDKSLSHPWLQDYQTWLDLREFETRIGERYITHESDDARWEIHAYTHNLVYPKHFIMAPNPDDMEEDP

SEQ ID NO: 17937 - protein, 33 aa, Artificial Sequence
  Synthetic polypeptide
PGNGGSHLFSHSRRLPDSSTYSLCTFLQSSYFL

SEQ ID NO: 17938 - protein, 8 aa, Artificial Sequence
  Synthetic polypeptide
WQRWLTPL

SEQ ID NO: 17939 - protein, 870 aa, Artificial Sequence
  Synthetic polypeptide
FCSSIILNPSTPLSQLTFFIPPPSIIFYFNFVICLILYIFVFISVFLLDCKFLEDKDYSVFTNCGASILHLPDMQEFPECGFFGMYDKILLFRHDMNSENILQLITSADEIHEGDLVEVVLSALATVEDFQIRPHTLYVHSYKAPTFCDYCGEMLWGLVRQGLKCEGCGLNYHKRCAFKIPNNCSGVRKRRLSNVSLPGPGLSVPRPLQPEYVALPSEESHVHQEPSKRIPSWSGRPIWMEKMVMCRVKVPHTFAVHSYTRPTICQYCKRLLKGLFRQGMQCKDCKFNCHKRCASKVPRDCLGEVTFNGEPSSLGTDTDIPMDIDNNDINSDSSRGLDDTEEPSPPEDKMFFLDPSDLDVERDEEAVKTISPSTSNNIPLMRVVQSIKHTKRKSSTMVKEGWMVHYTSRDNLRKRHYWRLDSKCLTLFQNESGSKYYKEIPLSEILRISSPRDFTNISQGSNPHCFEIITDTMVYFVGENNGDSSHNPVLAATGVGLDVAQSWEKAIRQALMPVTPQASVCTSPGQGKDHKDLSTSISVSNCQIQENVDISTVYQIFADEVLGSGQFGIVYGGKHRKTGRDVAIKVIDKMRFPTKQESQLRNEVAILQNLHHPGIVNLECMFETPERVFVVMEKLHGDMLEMILSSEKSRLPERITKFMVTQILVALRNLHFKNIVHCDLKPENVLLASAEPFPQVKLCDFGFARIIGEKSFRRSVVGTPAYLAPEVLRSKGYNRSLDMWSVGVIIYVSLSGTFPFNEDEDINDQIQNAAFMYPPNPWREISGEAIDLINNLLQVKMRKRYSVDKSLSHPWLQDYQTWLDLREFETRIGERYITHESDDARWEIHAYTHNLVYPKHFIMAPNPDDMEEDP

SEQ ID NO: 17940 - protein, 30 aa, Artificial Sequence
  Synthetic polypeptide
GLFCLYKLWGQYLALTGHARISRVWILWHV

SEQ ID NO: 17941 - protein, 47 aa, Artificial Sequence
  Synthetic polypeptide
IVSSWKIRTILSLQTVGPVSCTYRTCKNFQSVDSLACMTKFFSFAMT

SEQ ID NO: 17942 - protein, 33 aa, Artificial Sequence
  Synthetic polypeptide
LLEFRRWRPAWAICFQSVDSLACMTKFFSFAMT

SEQ ID NO: 17943 - protein, 33 aa, Artificial Sequence
  Synthetic polypeptide
STWGGLRQNDCLSSGDGDQPGQYVSRVWILWHV

SEQ ID NO: 17944 - protein, 805 aa, Artificial Sequence
  Synthetic polypeptide
VQEMETSLGNMFPECGFFGMYDKILLFRHDMNSENILQLITSADEIHEGDLVEVVLSALATVEDFQIRPHTLYVHSYKAPTFCDYCGEMLWGLVRQGLKCEGCGLNYHKRCAFKIPNNCSGVRKRRLSNVSLPGPGLSVPRPLQPEYVALPSEESHVHQEPSKRIPSWSGRPIWMEKMVMCRVKVPHTFAVHSYTRPTICQYCKRLLKGLFRQGMQCKDCKFNCHKRCASKVPRDCLGEVTFNGEPSSLGTDTDIPMDIDNNDINSDSSRGLDDTEEPSPPEDKMFFLDPSDLDVERDEEAVKTISPSTSNNIPLMRVVQSIKHTKRKSSTMVKEGWMVHYTSRDNLRKRHYWRLDSKCLTLFQNESGSKYYKEIPLSEILRISSPRDFTNISQGSNPHCFEIITDTMVYFVGENNGDSSHNPVLAATGVGLDVAQSWEKAIRQALMPVTPQASVCTSPGQGKDHKDLSTSISVSNCQIQENVDISTVYQIFADEVLGSGQFGIVYGGKHRKTGRDVAIKVIDKMRFPTKQESQLRNEVAILQNLHHPGIVNLECMFETPERVFVVMEKLHGDMLEMILSSEKSRLPERITKFMVTQILVALRNLHFKNIVHCDLKPENVLLASAEPFPQVKLCDFGFARIIGEKSFRRSVVGTPAYLAPEVLRSKGYNRSLDMWSVGVIIYVSLSGTFPFNEDEDINDQIQNAAFMYPPNPWREISGEAIDLINNLLQVKMRKRYSVDKSLSHPWLQDYQTWLDLREFETRIGERYITHESDDARWEIHAYTHNLVYPKHFIMAPNPDDMEEDP

SEQ ID NO: 17945 - protein, 51 aa, Artificial Sequence
  Synthetic polypeptide
GQAWWLTSVIPGVWEDHTDTLQGRSLPLEYLTVRNMRKSAVSPLCLRNQNG

SEQ ID NO: 17946 - protein, 51 aa, Artificial Sequence
  Synthetic polypeptide
PGMVAHICNPRSLGGPHRHVARKIITIRIFDREEYEKECSFSLVLEEPKWI

SEQ ID NO: 17947 - protein, 356 aa, Artificial Sequence
  Synthetic polypeptide
PGMVAHICNPRSLGGPHRHVARKIITIRIFDREEYEKECSFSLVLEEPKWIRRGMKEGFCFTDEYDDKQPLTSKEEEERRIAEMGRPILGEHTKLEVIIEESYEFKSTVDKLIKKTNLALVVGTNSWREQFIEAITVSAGEDDDDDECGEEKLPSCFDYVMHFLTVFWKVLFAFVPPTEYWNGWACFIVSILMIGLLTAFIGDLASHFGCTIGLKDSVTAVVFVALGTSVPDTFASKVAATQDQYADASIGNVTGSNAVNVFLGIGVAWSIAAIYHAANGEQFKVSPGTLAFSVTLFTIFAFINVGVLLYRRRPEIGGELGGPRTAKLLTSCLFVLLWLLYIFFSSLEAYCHIKGF

SEQ ID NO: 17948 - protein, 356 aa, Artificial Sequence
  Synthetic polypeptide
PGMVAHICNPRSLGGPHRHVARKIITIRIFDREEYEKECSFSLVLEEPKWIRRGMKGGFTITDEYDDKQPLTSKEEEERRIAEMGRPILGEHTKLEVIIEESYEFKSTVDKLIKKTNLALVVGTNSWREQFIEAITVSAGEDDDDDECGEEKLPSCFDYVMHFLTVFWKVLFAFVPPTEYWNGWACFIVSILMIGLLTAFIGDLASHFGCTIGLKDSVTAVVFVALGTSVPDTFASKVAATQDQYADASIGNVTGSNAVNVFLGIGVAWSIAAIYHAANGEQFKVSPGTLAFSVTLFTIFAFINVGVLLYRRRPEIGGELGGPRTAKLLTSCLFVLLWLLYIFFSSLEAYCHIKGF

SEQ ID NO: 17949 - protein, 384 aa, Artificial Sequence
  Synthetic polypeptide
PGMVAHICNPRSLGGPHRHVARKIITIRIFDREEYEKECSFSLVLEEPKWIRRGMKGGFTITGKYLFGQPVFRKVHAREHPILSTVITIADEYDDKQPLTSKEEEERRIAEMGRPILGEHTKLEVIIEESYEFKSTVDKLIKKTNLALVVGTNSWREQFIEAITVSAGEDDDDDECGEEKLPSCFDYVMHFLTVFWKVLFAFVPPTEYWNGWACFIVSILMIGLLTAFIGDLASHFGCTIGLKDSVTAVVFVALGTSVPDTFASKVAATQDQYADASIGNVTGSNAVNVFLGIGVAWSIAAIYHAANGEQFKVSPGTLAFSVTLFTIFAFINVGVLLYRRRPEIGGELGGPRTAKLLTSCLFVLLWLLYIFFSSLEAYCHIKGF

SEQ ID NO: 17950 - protein, 18 aa, Artificial Sequence
  Synthetic polypeptide
SQEFGRTTQTRCKEDHYH

SEQ ID NO: 17951 - protein, 44 aa, Artificial Sequence
  Synthetic polypeptide
EQLRSTAPSVSDAEDGRFLHFHLRWLHNNRKIPVWPTCLQEGSC

SEQ ID NO: 17952 - protein, 39 aa, Artificial Sequence
  Synthetic polypeptide
EQLRSTAPSVSDAEDGRFLHFHLRWLHNNRPTCLQEGSC

SEQ ID NO: 17953 - protein, 32 aa, Artificial Sequence
  Synthetic polypeptide
EQLRSTAPSVSDAEDGRFLHFHLRWLHNNRRI

SEQ ID NO: 17954 - protein, 300 aa, Artificial Sequence
  Synthetic polypeptide
GGFTITDEYDDKQPLTSKEEEERRIAEMGRPILGEHTKLEVIIEESYEFKSTVDKLIKKTNLALVVGTNSWREQFIEAITVSAGEDDDDDECGEEKLPSCFDYVMHFLTVFWKVLFAFVPPTEYWNGWACFIVSILMIGLLTAFIGDLASHFGCTIGLKDSVTAVVFVALGTSVPDTFASKVAATQDQYADASIGNVTGSNAVNVFLGIGVAWSIAAIYHAANGEQFKVSPGTLAFSVTLFTIFAFINVGVLLYRRRPEIGGELGGPRTAKLLTSCLFVLLWLLYIFFSSLEAYCHIKGF

SEQ ID NO: 17955 - protein, 328 aa, Artificial Sequence
  Synthetic polypeptide
GGFTITGKYLFGQPVFRKVHAREHPILSTVITIADEYDDKQPLTSKEEEERRIAEMGRPILGEHTKLEVIIEESYEFKSTVDKLIKKTNLALVVGTNSWREQFIEAITVSAGEDDDDDECGEEKLPSCFDYVMHFLTVFWKVLFAFVPPTEYWNGWACFIVSILMIGLLTAFIGDLASHFGCTIGLKDSVTAVVFVALGTSVPDTFASKVAATQDQYADASIGNVTGSNAVNVFLGIGVAWSIAAIYHAANGEQFKVSPGTLAFSVTLFTIFAFINVGVLLYRRRPEIGGELGGPRTAKLLTSCLFVLLWLLYIFFSSLEAYCHIKGF

SEQ ID NO: 17956 - protein, 323 aa, Artificial Sequence
  Synthetic polypeptide
GGFTITGQPVFRKVHAREHPILSTVITIADEYDDKQPLTSKEEEERRIAEMGRPILGEHTKLEVIIEESYEFKSTVDKLIKKTNLALVVGTNSWREQFIEAITVSAGEDDDDDECGEEKLPSCFDYVMHFLTVFWKVLFAFVPPTEYWNGWACFIVSILMIGLLTAFIGDLASHFGCTIGLKDSVTAVVFVALGTSVPDTFASKVAATQDQYADASIGNVTGSNAVNVFLGIGVAWSIAAIYHAANGEQFKVSPGTLAFSVTLFTIFAFINVGVLLYRRRPEIGGELGGPRTAKLLTSCLFVLLWLLYIFFSSLEAYCHIKGF

SEQ ID NO: 17957 - protein, 35 aa, Artificial Sequence
  Synthetic polypeptide
RSQDGRIGTAPVYSSQRERRRRRAISAFPSEVASQ

SEQ ID NO: 17958 - protein, 7 aa, Artificial Sequence
  Synthetic polypeptide
AKQYQSR

SEQ ID NO: 17959 - protein, 394 aa, Artificial Sequence
  Synthetic polypeptide
EQLRSTAPSVSDAEDGRFLHFHLSKTISVKVIDDEEYEKNKTFFLEIGEPRLVEMSEKKALLLNELGGFTITGKYLFGQPVFRKVHAREHPILSTVITIADEYDDKQPLTSKEEEERRIAEMGRPILGEHTKLEVIIEESYEFKSTVDKLIKKTNLALVVGTNSWREQFIEAITVSAGEDDDDDECGEEKLPSCFDYVMHFLTVFWKVLFAFVPPTEYWNGWACFIVSILMIGLLTAFIGDLASHFGCTIGLKDSVTAVVFVALGTSVPDTFASKVAATQDQYADASIGNVTGSNAVNVFLGIGVAWSIAAIYHAANGEQFKVSPGTLAFSVTLFTIFAFINVGVLLYRRRPEIGGELGGPRTAKLLTSCLFVLLWLLYIFFSSLEAYCHIKGF

SEQ ID NO: 17960 - protein, 389 aa, Artificial Sequence
  Synthetic polypeptide
EQLRSTAPSVSDAEDGRFLHFHLSKTISVKVIDDEEYEKNKTFFLEIGEPRLVEMSEKKALLLNELGGFTITGQPVFRKVHAREHPILSTVITIADEYDDKQPLTSKEEEERRIAEMGRPILGEHTKLEVIIEESYEFKSTVDKLIKKTNLALVVGTNSWREQFIEAITVSAGEDDDDDECGEEKLPSCFDYVMHFLTVFWKVLFAFVPPTEYWNGWACFIVSILMIGLLTAFIGDLASHFGCTIGLKDSVTAVVFVALGTSVPDTFASKVAATQDQYADASIGNVTGSNAVNVFLGIGVAWSIAAIYHAANGEQFKVSPGTLAFSVTLFTIFAFINVGVLLYRRRPEIGGELGGPRTAKLLTSCLFVLLWLLYIFFSSLEAYCHIKGF

SEQ ID NO: 17961 - protein, 88 aa, Artificial Sequence
  Synthetic polypeptide
EQLRSTAPSVSDAEDGRFLHFHLSKTISVKVIDDEEYEKNKTFFLEIGEPRLVEMSEKKGRSLPLEYLTVRNMRKSAVSPLCLRNQNG

SEQ ID NO: 17962 - protein, 39 aa, Artificial Sequence
  Synthetic polypeptide
RSQDGRIGTAPVYSSQRERRRRRAISAFPSEQNNISQGN

SEQ ID NO: 17963 - protein, 37 aa, Artificial Sequence
  Synthetic polypeptide
GLHSPAELKIITIRIFDREEYEKECSFSLVLEEPKWI

SEQ ID NO: 17964 - protein, 342 aa, Artificial Sequence
  Synthetic polypeptide
GLHSPAELKIITIRIFDREEYEKECSFSLVLEEPKWIRRGMKEGFCFTDEYDDKQPLTSKEEEERRIAEMGRPILGEHTKLEVIIEESYEFKSTVDKLIKKTNLALVVGTNSWREQFIEAITVSAGEDDDDDECGEEKLPSCFDYVMHFLTVFWKVLFAFVPPTEYWNGWACFIVSILMIGLLTAFIGDLASHFGCTIGLKDSVTAVVFVALGTSVPDTFASKVAATQDQYADASIGNVTGSNAVNVFLGIGVAWSIAAIYHAANGEQFKVSPGTLAFSVTLFTIFAFINVGVLLYRRRPEIGGELGGPRTAKLLTSCLFVLLWLLYIFFSSLEAYCHIKGF

SEQ ID NO: 17965 - protein, 342 aa, Artificial Sequence
  Synthetic polypeptide
GLHSPAELKIITIRIFDREEYEKECSFSLVLEEPKWIRRGMKGGFTITDEYDDKQPLTSKEEEERRIAEMGRPILGEHTKLEVIIEESYEFKSTVDKLIKKTNLALVVGTNSWREQFIEAITVSAGEDDDDDECGEEKLPSCFDYVMHFLTVFWKVLFAFVPPTEYWNGWACFIVSILMIGLLTAFIGDLASHFGCTIGLKDSVTAVVFVALGTSVPDTFASKVAATQDQYADASIGNVTGSNAVNVFLGIGVAWSIAAIYHAANGEQFKVSPGTLAFSVTLFTIFAFINVGVLLYRRRPEIGGELGGPRTAKLLTSCLFVLLWLLYIFFSSLEAYCHIKGF

SEQ ID NO: 17966 - protein, 370 aa, Artificial Sequence
  Synthetic polypeptide
GLHSPAELKIITIRIFDREEYEKECSFSLVLEEPKWIRRGMKGGFTITGKYLFGQPVFRKVHAREHPILSTVITIADEYDDKQPLTSKEEEERRIAEMGRPILGEHTKLEVIIEESYEFKSTVDKLIKKTNLALVVGTNSWREQFIEAITVSAGEDDDDDECGEEKLPSCFDYVMHFLTVFWKVLFAFVPPTEYWNGWACFIVSILMIGLLTAFIGDLASHFGCTIGLKDSVTAVVFVALGTSVPDTFASKVAATQDQYADASIGNVTGSNAVNVFLGIGVAWSIAAIYHAANGEQFKVSPGTLAFSVTLFTIFAFINVGVLLYRRRPEIGGELGGPRTAKLLTSCLFVLLWLLYIFFSSLEAYCHIKGF

SEQ ID NO: 17967 - protein, 49 aa, Artificial Sequence
  Synthetic polypeptide
WFYKGLFPLLLGTSPLCHHVKKDVFASLSAMIISFLRPPQPCRTEDHYH

SEQ ID NO: 17968 - protein, 47 aa, Artificial Sequence
  Synthetic polypeptide
GAFPAFTRHFSFMPPCEEGCICVPFCHDYKFPKASTALQNSKQYQSR

SEQ ID NO: 17969 - protein, 378 aa, Artificial Sequence
  Synthetic polypeptide
GLHSPAELKTISVKVIDDEEYEKNKTFFLEIGEPRLVEMSEKKALLLNELGGFTITGKYLFGQPVFRKVHAREHPILSTVITIADEYDDKQPLTSKEEEERRIAEMGRPILGEHTKLEVIIEESYEFKSTVDKLIKKTNLALVVGTNSWREQFIEAITVSAGEDDDDDECGEEKLPSCFDYVMHFLTVFWKVLFAFVPPTEYWNGWACFIVSILMIGLLTAFIGDLASHFGCTIGLKDSVTAVVFVALGTSVPDTFASKVAATQDQYADASIGNVTGSNAVNVFLGIGVAWSIAAIYHAANGEQFKVSPGTLAFSVTLFTIFAFINVGVLLYRRRPEIGGELGGPRTAKLLTSCLFVLLWLLYIFFSSLEAYCHIKGF

SEQ ID NO: 17970 - protein, 373 aa, Artificial Sequence
  Synthetic polypeptide
GLHSPAELKTISVKVIDDEEYEKNKTFFLEIGEPRLVEMSEKKALLLNELGGFTITGQPVFRKVHAREHPILSTVITIADEYDDKQPLTSKEEEERRIAEMGRPILGEHTKLEVIIEESYEFKSTVDKLIKKTNLALVVGTNSWREQFIEAITVSAGEDDDDDECGEEKLPSCFDYVMHFLTVFWKVLFAFVPPTEYWNGWACFIVSILMIGLLTAFIGDLASHFGCTIGLKDSVTAVVFVALGTSVPDTFASKVAATQDQYADASIGNVTGSNAVNVFLGIGVAWSIAAIYHAANGEQFKVSPGTLAFSVTLFTIFAFINVGVLLYRRRPEIGGELGGPRTAKLLTSCLFVLLWLLYIFFSSLEAYCHIKGF

SEQ ID NO: 17971 - protein, 72 aa, Artificial Sequence
  Synthetic polypeptide
GLHSPAELKTISVKVIDDEEYEKNKTFFLEIGEPRLVEMSEKKGRSLPLEYLTVRNMRKSAVSPLCLRNQNG

SEQ ID NO: 17972 - protein, 52 aa, Artificial Sequence
  Synthetic polypeptide
WFYKGLFPLLLGTSPLCHHVKKDVFASLSAMIISFLRPPQPCRTQNNISQGN

SEQ ID NO: 17973 - protein, 227 aa, Artificial Sequence
  Synthetic polypeptide
LVNSLWLSLLICRIIEAICIGWFTAECIVRFIVSKNKCEFVKRPLNIIDLLAITPYYISVLMTVFTGENSQLQRAGVTLRVLRMMRIFWVIKLARHFIGLQTLGLTLKRCYREMVMLLVFICVAMAIFSALSQLLEHGLDLETSNKDFTSIPAACWWVIISMTTVGYGDMYPITVPGRILGGVCVVSGIVLLALPITFIYHSFVQCYHELKFRSARYSRSLSTEFLN

SEQ ID NO: 17974 - protein, 12 aa, Artificial Sequence
  Synthetic polypeptide
SILFGLVSSFVG

SEQ ID NO: 17975 - protein, 6 aa, Artificial Sequence
  Synthetic polypeptide
KPASFL

SEQ ID NO: 17976 - protein, 38 aa, Artificial Sequence
  Synthetic polypeptide
KTVWRFLKKLKIELPCDPAVSLGVYPNENLPAFYKCCS

SEQ ID NO: 17977 - protein, 528 aa, Artificial Sequence
  Synthetic polypeptide
NYHVIQQSHWEYIQMKTCQLFINAAVDSPAIDYHISLAQSALQICLTHPELQNEICCQLIKQTRRRQPQNQPGPLQGWQLLALCVGLFLPHHPFLWLLRLHLKRNADSRTEFGKYAIYCQRCVERTQQNGDREARPSRMEILSTLLRNPYHHSLPFSIPVHFMNGIYQVVGFDASTTVEEFLNTLNQDTGMRKPAQSGFALFTDDPSGRDLEHCLQGNIKICDIISKWEQASKEQQPGKCEGTRTVRLTYKNRLYFSVQARGETDREKLLLMYQTNDQIINGLFPLNKDLALEMAALLSQVEIGDFERPFSTPAGHVTNQCKVNQTLKQVIEKFYPKRYRDGCSEEQLRQLCQRLSTRWMALRGHSAADCVRIYLTVARKWPFFGAKLFLAKPITPSSLGSTFLWLAVHEDGLSLLEYNSMRLIVSYVYKSLMTFGGYQDDFMVVINNTHSKDKPTEKLLFAMAKPKILEITLLIASYINNFHQQKAAFHHLSAPALLSAQTRGPQARMMGSQPLLSSSRPTKGPTLL

SEQ ID NO: 17978 - protein, 11 aa, Artificial Sequence
  Synthetic polypeptide
FTCSGRPASFL

SEQ ID NO: 17979 - protein, 518 aa, Artificial Sequence
  Synthetic polypeptide
LHMFRKTCQLFINAAVDSPAIDYHISLAQSALQICLTHPELQNEICCQLIKQTRRRQPQNQPGPLQGWQLLALCVGLFLPHHPFLWLLRLHLKRNADSRTEFGKYAIYCQRCVERTQQNGDREARPSRMEILSTLLRNPYHHSLPFSIPVHFMNGIYQVVGFDASTTVEEFLNTLNQDTGMRKPAQSGFALFTDDPSGRDLEHCLQGNIKICDIISKWEQASKEQQPGKCEGTRTVRLTYKNRLYFSVQARGETDREKLLLMYQTNDQIINGLFPLNKDLALEMAALLSQVEIGDFERPFSTPAGHVTNQCKVNQTLKQVIEKFYPKRYRDGCSEEQLRQLCQRLSTRWMALRGHSAADCVRIYLTVARKWPFFGAKLFLAKPITPSSLGSTFLWLAVHEDGLSLLEYNSMRLIVSYVYKSLMTFGGYQDDFMVVINNTHSKDKPTEKLLFAMAKPKILEITLLIASYINNFHQQKAAFHHLSAPALLSAQTRGPQARMMGSQPLLSSSRPTKGPTLL

SEQ ID NO: 17980 - protein, 15 aa, Artificial Sequence
  Synthetic polypeptide
SHVQEDLPAFYKCCS

SEQ ID NO: 17981 - protein, 37 aa, Artificial Sequence
  Synthetic polypeptide
LAPIIPALWEAKRGGSLEARSSRPAWIDLEPEGRVYV

SEQ ID NO: 17982 - protein, 647 aa, Artificial Sequence
  Synthetic polypeptide
LAPIIPALWEAKRGGSLEARSSRPAWIDLEPEGRVYVIIDLSGSSGEAPKDNEERVFRERMRPRKRQGAVRRRVHQVNGHKFMATYLRQPTYCSHCRDFIWGVIGKQGYQCQVCTCVVHKRCHELIITKCAGLKKQETPDQVGSQRFSVNMPHKFGIHNYKVPTFCDHCGSLLWGLLRQGLQCKVCKMNVHRRCETNVAPNCGVDARGIAKVLADLGVTPDKITNSGQRRKKLIAGAESPQPASGSSPSEEDRSKSAPTSPCDQEIKELENNIRKALSFDNRGEEHRAASSPDGQLMSPGENGEVRQGQAKRLGLDEFNFIKVLGKGSFGKVMLAELKGKDEVYAVKVLKKDVILQDDDVDCTMTEKRILALARKHPYLTQLYCCFQTKDRLFFVMEYVNGGDLMFQIQRSRKFDEPRSRFYAAEVTSALMFLHQHGVIYRDLKLDNILLDAEGHCKLADFGMCKEGILNGVTTTTFCGTPDYIAPEILQELEYGPSVDWWALGVLMYEMMAGQPPFEADNEDDLFESILHDDVLYPVWLSKEAVSILKAFMTKNPHKRLGCVASQNGEDAIKQHPFFKEIDWVLLEQKKIKPPFKPRIKTKRDVNNFDQDFTREEPVLTLVDEAIVKQINQEEFKGFSYFGEDLMP

SEQ ID NO: 17983 - protein, 9 aa, Artificial Sequence
  Synthetic polypeptide
SQEFETSLD

SEQ ID NO: 17984 - protein, 32 aa, Artificial Sequence
  Synthetic polypeptide
SQRFGRPREEDRLKPGVRDQPGLIWSQKEECM

SEQ ID NO: 17985 - protein, 23 aa, Artificial Sequence
  Synthetic polypeptide
ICDRSMLLCGMFSFNPEGIEDCF

SEQ ID NO: 17986 - protein, 57 aa, Artificial Sequence
  Synthetic polypeptide
IPSKYVIGACCYVECSALTQKGLKTVFDEAIIAILTPKKHTVKKRIGSRCINCCLIT

SEQ ID NO: 17987 - protein, 17 aa, Artificial Sequence
  Synthetic polypeptide
ALGVWLVHIEMCSTVHV

SEQ ID NO: 17988 - protein, 11 aa, Artificial Sequence
  Synthetic polypeptide
DVLHSTCVRPC

SEQ ID NO: 17989 - protein, 772 aa, Artificial Sequence
  Synthetic polypeptide
STLRCAPQYMCEAMLILGKLHYVEGSYRDAISMYARAGIDDMSMENKPLYQMRLLSEAFVIKGLSLERLPNSIASRFRLTEREEEVITCFERASWIAQVFLQELEKTTNNSTSRHLKGCHPLDYELTYFLEAALQSAYVKNLKKGNIVKGMRELREVLRTVETKATQNFKVMAAKHLAGVLLHSLSEECYWSPLSHPLPEFMGKEESSFATQALRKPHLYEGDNLYCPKDNIEEALLLLLISESMATRDVVLSRVPEQEEDRTVSLQNAAAIYDLLSITLGRRGQYVMLSECLERAMKFAFGEFHLWYQVALSMVACGKSAYAVSLLRECVKLRPSDPTVPLMAAKVCIGSLRWLEEAEHFAMMVISLGEEAGEFLPKGYLALGLTYSLQATDATLKSKQDELHRKALQTLERAQQLAPSDPQVILYVSLQLALVRQISSAMEQLQEALKVRKDDAHALHLLALLFSAQKHHQHALDVVNMAITEHPENFNLMFTKVKLEQVLKGPEEALVTCRQVLRLWQTLYSFSQLGDFRSPEGFQTPQRNICNSEIYRGGGLEKDGSFGEGLTMKKQSGMHLTLPDAHDADSGSRRASSIAASRLEEAMSELTMPSSVLKQGPMQLWTTLEQIWLQAAELFMEQQHLKEAGFCIQEAAGLFPTSHSVLYMRGRLAEVKGNLEEAKQLYKEALTVNPDGVRIMHSLGLMLSRLGHKSLAQKVLRDAVERQSTCHEAWQGLGEVLQAQGQNEAAVDCFLTALELEASSPVLPFSIIPREL

SEQ ID NO: 17990 - protein, 748 aa, Artificial Sequence
  Synthetic polypeptide
STLRCAPQYMCEAMLILGKLHYVEGSYRDAISMYARAGIDDMSMENKPLYQMRLLSEAFVIKGLSLERLPNSIASRFRLTEREEEVITCFERASWIAQVFLQELEKTTNNSTSRHLKGCHPLDYELTYFLEAALQSAYVKNLKKGNIVKGMRELREVLRTVETKATQNFKVMAAKHLAGVLLHSLSEECYWSPLSHPLPEFMGKEESSFATQALRKPHLYEGDNLYCPKDNIEEALLLLLISESMATRDVVLSRVPEQEEDRTVSLQNAAAIYDLLSITLGRRGQYVMLSECLERAMKFAFGEFHLWYQVALSMVACGKSAYAVSLLRECVKLRPSDPTVPLMAAKVCIGSLRWLEEAEHFAMMVISLGEEAGEFLPKGYLALGLTYSLQATDATLKSKQDELHRKALQTLERAQQLAPSDPQVILYVSLQLALVRQISSAMEQLQEALKVRKDDAHALHLLALLFSAQKHHQHALDVVNMAITEHPENFNLMFTKVKLEQVLKGPEEALVTCRQVLRLWQTLYSFSQLGGLEKDGSFGEGLTMKKQSGMHLTLPDAHDADSGSRRASSIAASRLEEAMSELTMPSSVLKQGPMQLWTTLEQIWLQAAELFMEQQHLKEAGFCIQEAAGLFPTSHSVLYMRGRLAEVKGNLEEAKQLYKEALTVNPDGVRIMHSLGLMLSRLGHKSLAQKVLRDAVERQSTCHEAWQGLGEVLQAQGQNEAAVDCFLTALELEASSPVLPFSIIPREL

SEQ ID NO: 17991 - protein, 220 aa, Artificial Sequence
  Synthetic polypeptide
STLRCAPQYMCEAMLILGKLHYVEGSYRDAISMYARAGIDDMSMENKPLYQMRLLSEAFVIKGLSLERLPNSIASRFRLTEREEEVITCFERASWIAQVFLQELEKTTNNSTSRHLKGCHPLDYELTYFLEAALQSAYVKNLKKGNIVKGMRELREVLRTVETKATQNFKVPLLPQGQHRGSPPAPPHQRIHGNSRCGAEPGAGAGGGPDSELAECRSHL

SEQ ID NO: 17992 - protein, 4 aa, Artificial Sequence
  Synthetic polypeptide
EDHK

SEQ ID NO: 17993 - protein, 11 aa, Artificial Sequence
  Synthetic polypeptide
RGPQITARRGI

SEQ ID NO: 17994 - protein, 667 aa, Artificial Sequence
  Synthetic polypeptide
RTTNNSTSRHLKGCHPLDYELTYFLEAALQSAYVKNLKKGNIVKGMRELREVLRTVETKATQNFKVMAAKHLAGVLLHSLSEECYWSPLSHPLPEFMGKEESSFATQALRKPHLYEGDNLYCPKDNIEEALLLLLISESMATRDVVLSRVPEQEEDRTVSLQNAAAIYDLLSITLGRRGQYVMLSECLERAMKFAFGEFHLWYQVALSMVACGKSAYAVSLLRECVKLRPSDPTVPLMAAKVCIGSLRWLEEAEHFAMMVISLGEEAGEFLPKGYLALGLTYSLQATDATLKSKQDELHRKALQTLERAQQLAPSDPQVILYVSLQLALVRQISSAMEQLQEALKVRKDDAHALHLLALLFSAQKHHQHALDVVNMAITEHPENFNLMFTKVKLEQVLKGPEEALVTCRQVLRLWQTLYSFSQLGDFRSPEGFQTPQRNICNSEIYRGGGLEKDGSFGEGLTMKKQSGMHLTLPDAHDADSGSRRASSIAASRLEEAMSELTMPSSVLKQGPMQLWTTLEQIWLQAAELFMEQQHLKEAGFCIQEAAGLFPTSHSVLYMRGRLAEVKGNLEEAKQLYKEALTVNPDGVRIMHSLGLMLSRLGHKSLAQKVLRDAVERQSTCHEAWQGLGEVLQAQGQNEAAVDCFLTALELEASSPVLPFSIIPREL

SEQ ID NO: 17995 - protein, 643 aa, Artificial Sequence
  Synthetic polypeptide
RTTNNSTSRHLKGCHPLDYELTYFLEAALQSAYVKNLKKGNIVKGMRELREVLRTVETKATQNFKVMAAKHLAGVLLHSLSEECYWSPLSHPLPEFMGKEESSFATQALRKPHLYEGDNLYCPKDNIEEALLLLLISESMATRDVVLSRVPEQEEDRTVSLQNAAAIYDLLSITLGRRGQYVMLSECLERAMKFAFGEFHLWYQVALSMVACGKSAYAVSLLRECVKLRPSDPTVPLMAAKVCIGSLRWLEEAEHFAMMVISLGEEAGEFLPKGYLALGLTYSLQATDATLKSKQDELHRKALQTLERAQQLAPSDPQVILYVSLQLALVRQISSAMEQLQEALKVRKDDAHALHLLALLFSAQKHHQHALDVVNMAITEHPENFNLMFTKVKLEQVLKGPEEALVTCRQVLRLWQTLYSFSQLGGLEKDGSFGEGLTMKKQSGMHLTLPDAHDADSGSRRASSIAASRLEEAMSELTMPSSVLKQGPMQLWTTLEQIWLQAAELFMEQQHLKEAGFCIQEAAGLFPTSHSVLYMRGRLAEVKGNLEEAKQLYKEALTVNPDGVRIMHSLGLMLSRLGHKSLAQKVLRDAVERQSTCHEAWQGLGEVLQAQGQNEAAVDCFLTALELEASSPVLPFSIIPREL

SEQ ID NO: 17996 - protein, 115 aa, Artificial Sequence
  Synthetic polypeptide
RTTNNSTSRHLKGCHPLDYELTYFLEAALQSAYVKNLKKGNIVKGMRELREVLRTVETKATQNFKVPLLPQGQHRGSPPAPPHQRIHGNSRCGAEPGAGAGGGPDSELAECRSHL

SEQ ID NO: 17997 - protein, 82 aa, Artificial Sequence
  Synthetic polypeptide
DRLYKKKLFLISWTSWCAPVVLAAREAEEHREGHERAPGGAADCGDQSNSELQSASTAPRTTSRKPSCSSSSANPWQLEMWC

SEQ ID NO: 17998 - protein, 69 aa, Artificial Sequence
  Synthetic polypeptide
DRLYKKKLFLISWTSWCAPVVLAAREAEEHREGHERAPGGAADCGDQSNSELQSDGGQAPGGGPAALPE

SEQ ID NO: 17999 - protein, 3 aa, Artificial Sequence
  Synthetic polypeptide
GTS

SEQ ID NO: 18000 - protein, 633 aa, Artificial Sequence
  Synthetic polypeptide
LLGRLRNIVKGMRELREVLRTVETKATQNFKVMAAKHLAGVLLHSLSEECYWSPLSHPLPEFMGKEESSFATQALRKPHLYEGDNLYCPKDNIEEALLLLLISESMATRDVVLSRVPEQEEDRTVSLQNAAAIYDLLSITLGRRGQYVMLSECLERAMKFAFGEFHLWYQVALSMVACGKSAYAVSLLRECVKLRPSDPTVPLMAAKVCIGSLRWLEEAEHFAMMVISLGEEAGEFLPKGYLALGLTYSLQATDATLKSKQDELHRKALQTLERAQQLAPSDPQVILYVSLQLALVRQISSAMEQLQEALKVRKDDAHALHLLALLFSAQKHHQHALDVVNMAITEHPENFNLMFTKVKLEQVLKGPEEALVTCRQVLRLWQTLYSFSQLGDFRSPEGFQTPQRNICNSEIYRGGGLEKDGSFGEGLTMKKQSGMHLTLPDAHDADSGSRRASSIAASRLEEAMSELTMPSSVLKQGPMQLWTTLEQIWLQAAELFMEQQHLKEAGFCIQEAAGLFPTSHSVLYMRGRLAEVKGNLEEAKQLYKEALTVNPDGVRIMHSLGLMLSRLGHKSLAQKVLRDAVERQSTCHEAWQGLGEVLQAQGQNEAAVDCFLTALELEASSPVLPFSIIPREL

SEQ ID NO: 18001 - protein, 609 aa, Artificial Sequence
  Synthetic polypeptide
LLGRLRNIVKGMRELREVLRTVETKATQNFKVMAAKHLAGVLLHSLSEECYWSPLSHPLPEFMGKEESSFATQALRKPHLYEGDNLYCPKDNIEEALLLLLISESMATRDVVLSRVPEQEEDRTVSLQNAAAIYDLLSITLGRRGQYVMLSECLERAMKFAFGEFHLWYQVALSMVACGKSAYAVSLLRECVKLRPSDPTVPLMAAKVCIGSLRWLEEAEHFAMMVISLGEEAGEFLPKGYLALGLTYSLQATDATLKSKQDELHRKALQTLERAQQLAPSDPQVILYVSLQLALVRQISSAMEQLQEALKVRKDDAHALHLLALLFSAQKHHQHALDVVNMAITEHPENFNLMFTKVKLEQVLKGPEEALVTCRQVLRLWQTLYSFSQLGGLEKDGSFGEGLTMKKQSGMHLTLPDAHDADSGSRRASSIAASRLEEAMSELTMPSSVLKQGPMQLWTTLEQIWLQAAELFMEQQHLKEAGFCIQEAAGLFPTSHSVLYMRGRLAEVKGNLEEAKQLYKEALTVNPDGVRIMHSLGLMLSRLGHKSLAQKVLRDAVERQSTCHEAWQGLGEVLQAQGQNEAAVDCFLTALELEASSPVLPFSIIPREL

SEQ ID NO: 18002 - protein, 81 aa, Artificial Sequence
  Synthetic polypeptide
LLGRLRNIVKGMRELREVLRTVETKATQNFKVPLLPQGQHRGSPPAPPHQRIHGNSRCGAEPGAGAGGGPDSELAECRSHL

SEQ ID NO: 18003 - protein, 30 aa, Artificial Sequence
  Synthetic polypeptide
IQGNSRCGAEPGAGAGGGPDSELAECRSHL

SEQ ID NO: 18004 - protein, 55 aa, Artificial Sequence
  Synthetic polypeptide
NCENCKHTRDCSIKRLACAPQKCQCHERERWRAASRYREIKETWHLNTRQLEMWC

SEQ ID NO: 18005 - protein, 36 aa, Artificial Sequence
  Synthetic polypeptide
RDMAPEYKATRDVVLSRVPEQEEDRTVSLQNAAAIY

SEQ ID NO: 18006 - protein, 535 aa, Artificial Sequence
  Synthetic polypeptide
RDMAPEYKATRDVVLSRVPEQEEDRTVSLQNAAAIYDLLSITLGRRGQYVMLSECLERAMKFAFGEFHLWYQVALSMVACGKSAYAVSLLRECVKLRPSDPTVPLMAAKVCIGSLRWLEEAEHFAMMVISLGEEAGEFLPKGYLALGLTYSLQATDATLKSKQDELHRKALQTLERAQQLAPSDPQVILYVSLQLALVRQISSAMEQLQEALKVRKDDAHALHLLALLFSAQKHHQHALDVVNMAITEHPENFNLMFTKVKLEQVLKGPEEALVTCRQVLRLWQTLYSFSQLGDFRSPEGFQTPQRNICNSEIYRGGGLEKDGSFGEGLTMKKQSGMHLTLPDAHDADSGSRRASSIAASRLEEAMSELTMPSSVLKQGPMQLWTTLEQIWLQAAELFMEQQHLKEAGFCIQEAAGLFPTSHSVLYMRGRLAEVKGNLEEAKQLYKEALTVNPDGVRIMHSLGLMLSRLGHKSLAQKVLRDAVERQSTCHEAWQGLGEVLQAQGQNEAAVDCFLTALELEASSPVLPFSIIPREL

SEQ ID NO: 18007 - protein, 511 aa, Artificial Sequence
  Synthetic polypeptide
RDMAPEYKATRDVVLSRVPEQEEDRTVSLQNAAAIYDLLSITLGRRGQYVMLSECLERAMKFAFGEFHLWYQVALSMVACGKSAYAVSLLRECVKLRPSDPTVPLMAAKVCIGSLRWLEEAEHFAMMVISLGEEAGEFLPKGYLALGLTYSLQATDATLKSKQDELHRKALQTLERAQQLAPSDPQVILYVSLQLALVRQISSAMEQLQEALKVRKDDAHALHLLALLFSAQKHHQHALDVVNMAITEHPENFNLMFTKVKLEQVLKGPEEALVTCRQVLRLWQTLYSFSQLGGLEKDGSFGEGLTMKKQSGMHLTLPDAHDADSGSRRASSIAASRLEEAMSELTMPSSVLKQGPMQLWTTLEQIWLQAAELFMEQQHLKEAGFCIQEAAGLFPTSHSVLYMRGRLAEVKGNLEEAKQLYKEALTVNPDGVRIMHSLGLMLSRLGHKSLAQKVLRDAVERQSTCHEAWQGLGEVLQAQGQNEAAVDCFLTALELEASSPVLPFSIIPREL

SEQ ID NO: 18008 - protein, 50 aa, Artificial Sequence
  Synthetic polypeptide
DVTCSSLLSTMIVRPPQPHGTEVCPHQASSHPKRCIFRIWGPGENRDLSE

SEQ ID NO: 18009 - protein, 652 aa, Artificial Sequence
  Synthetic polypeptide
GLLSHMELRFVLTKLRVIQKGAFSGFGDLEKIEISQNDVLEVIEADVFSNLPKLHEIRIEKANNLLYINPEAFQNLPNLQYLLISNTGIKHLPDVHKIHSLQKVLLDIQDNINIHTIERNSFVGLSFESVILWLNKNGIQEIHNCAFNGTQLDELNLSDNNNLEELPNDVFHGASGPVILDISRTRIHSLPSYGLENLKKLRARSTYNLKKLPTLEKLVALMEASLTYPSHCCAFANWRRQISELHPICNKSILRQEVDYMTQARGQRSSLAEDNESSYSRGFDMTYTEFDYDLCNEVVDVTCSPKPDAFNPCEDIMGYNILRVLIWFISILAITGNIIVLVILTTSQYKLTVPRFLMCNLAFADLCIGIYLLLIASVDIHTKSQYHNYAIDWQTGAGCDAAGFFTVFASELSVYTLTAITLERWHTITHAMQLDCKVQLRHAASVMVMGWIFAFAAALFPIFGISSYMKVSICLPMDIDSPLSQLYVMSLLVLNVLAFVVICGCYIHIYLTVRNPNIVSSSSDTRIAKRMAMLIFTDFLCMAPISFFAISASLKVPLITVSKAKILLVLFHPINSCANPFLYAIFTKNFRRDFFILLSKCGCYEMQAQIYRTETSSTVHNTHPRNGHCSSAPRVTSGSTYILVPLSHLAQN

SEQ ID NO: 18010 - protein, 235 aa, Artificial Sequence
  Synthetic polypeptide
GLLSHMELRFVLTKLRVIQKGAFSGFGDLEKIEISQNDVLEVIEADVFSNLPKLHEIRIEKANNLLYINPEAFQNLPNLQYLLISNTGIKHLPDVHKIHSLQKVLLDIQDNINIHTIERNSFVGLSFESVILWLNKNGIQEIHNCAFNGTQLDELNLSDNNNLEELPNDVFHGASGPVILSELHPICNKSILRQEVDYMTQARGQRSSLAEDNESSYSRGFDMTYTEFDYDLCNE

SEQ ID NO: 18011 - protein, 590 aa, Artificial Sequence
  Synthetic polypeptide
GLLSHMELRFVLTKLRVIQKGAFSGFGDLEKIEISQNDVLEVIEADVFSNLPKLHEIRIEKANNLLYINPEAFQNLPNLQYLLISNTGIKHLPDVHKIHSLQKVLLDIQDNINIHTIERNSFVGLSFESVILWLNKNGIQEIHNCAFNGTQLDELNLSDNNNLEELPNDVFHGASGPVILSELHPICNKSILRQEVDYMTQARGQRSSLAEDNESSYSRGFDMTYTEFDYDLCNEVVDVTCSPKPDAFNPCEDIMGYNILRVLIWFISILAITGNIIVLVILTTSQYKLTVPRFLMCNLAFADLCIGIYLLLIASVDIHTKSQYHNYAIDWQTGAGCDAAGFFTVFASELSVYTLTAITLERWHTITHAMQLDCKVQLRHAASVMVMGWIFAFAAALFPIFGISSYMKVSICLPMDIDSPLSQLYVMSLLVLNVLAFVVICGCYIHIYLTVRNPNIVSSSSDTRIAKRMAMLIFTDFLCMAPISFFAISASLKVPLITVSKAKILLVLFHPINSCANPFLYAIFTKNFRRDFFILLSKCGCYEMQAQIYRTETSSTVHNTHPRNGHCSSAPRVTSGSTYILVPLSHLAQN

SEQ ID NO: 18012 - protein, 626 aa, Artificial Sequence
  Synthetic polypeptide
GLLSHMELRFVLTKLRVIQKGAFSGFGDLEKIEISQNDVLEVIEADVFSNLPKLHEIRIEKANNLLYINPEAFQNLPNLQYLLISNTGIKHLPDVHKIHSLQKVLLWLNKNGIQEIHNCAFNGTQLDELNLSDNNNLEELPNDVFHGASGPVILDISRTRIHSLPSYGLENLKKLRARSTYNLKKLPTLEKLVALMEASLTYPSHCCAFANWRRQISELHPICNKSILRQEVDYMTQARGQRSSLAEDNESSYSRGFDMTYTEFDYDLCNEVVDVTCSPKPDAFNPCEDIMGYNILRVLIWFISILAITGNIIVLVILTTSQYKLTVPRFLMCNLAFADLCIGIYLLLIASVDIHTKSQYHNYAIDWQTGAGCDAAGFFTVFASELSVYTLTAITLERWHTITHAMQLDCKVQLRHAASVMVMGWIFAFAAALFPIFGISSYMKVSICLPMDIDSPLSQLYVMSLLVLNVLAFVVICGCYIHIYLTVRNPNIVSSSSDTRIAKRMAMLIFTDFLCMAPISFFAISASLKVPLITVSKAKILLVLFHPINSCANPFLYAIFTKNFRRDFFILLSKCGCYEMQAQIYRTETSSTVHNTHPRNGHCSSAPRVTSGSTYILVPLSHLAQN

SEQ ID NO: 18013 - protein, 109 aa, Artificial Sequence
  Synthetic polypeptide
GLLSHMELRFVLTKLRVIQKGAFSGFGDLEKIEISQNDVLEVIEADVFSNLPKLHEIRIEKANNLLYINPEAFQNLPNLQYLSFSSFVLENAKVENGDHRAFSDRTNAL

SEQ ID NO: 18014 - protein, 26 aa, Artificial Sequence
  Synthetic polypeptide
EGCVCFPFHDDCKFPEASVALRNYHR

SEQ ID NO: 18015 - protein, 36 aa, Artificial Sequence; identical to SEQ ID NO: 6077
  Synthetic polypeptide

SEQ ID NO: 18016 - protein, 135 aa, Artificial Sequence; identical to SEQ ID NO: 3208
  Synthetic polypeptide

SEQ ID NO: 18017 - protein, 14 aa, Artificial Sequence
  Synthetic polypeptide
EGCVCFPFHDDYHR

SEQ ID NO: 18018 - protein, 29 aa, Artificial Sequence
  Synthetic polypeptide
LPQMTSLWPQQSVPAMMRTLTPVSRAQVG

SEQ ID NO: 18019 - protein, 171 aa, Artificial Sequence
  Synthetic polypeptide
VSSHKSRWFYKHLAFPLRALISLFCGHVKKDVFASLSTMITTDDILVASAECPSDDEDIDPCEPSSGGLANPTRAGGREPYPGSAEVIRESSSTTGMVVGIVAAAALCILILLYAMYKYRNRDEGSYHVDESRNYISNSAQSNGAVVKEKQPSSAKSSNKNKKNKDKEYYV

SEQ ID NO: 18020 - protein, 24 aa, Artificial Sequence
  Synthetic polypeptide
NPISMKHTKIARPGGRNAAHFRKA

SEQ ID NO: 18021 - protein, 1033 aa, Artificial Sequence
  Synthetic polypeptide
PGLVEGMQLISEKPETEAVVKEKLTGLHKMWEVLESTTQTKAQRLFDANKAELFTQSCADLDKWLHGLESQIQSDDYGKDLTSVNILLKKQQMLENQMEVRKKEIEELQSQAQALSQEGKSTDEVDSKRLTVQTKFMELLEPLNERKHNLLASKEIHQFNRDVEDEILWVGERMPLATSTDHGHNLQTVQLLIKKNQTLQKEIQGHQPRIDDIFERSQNIVTDSSSLSAEAIRQRLADLKQLWGLLIEETEKRHRRLEEAHRAQQYYFDAAEAEAWMSEQELYMMSEEKAKDEQSAVSMLKKHQILEQAVEDYAETVHQLSKTSRALVADSHPESERISMRQSKVDKLYAGLKDLAEERRGKLDERHRLFQLNREVDDLEQWIAEREVVAGSHELGQDYEHVTMLQERFREFARDTGNIGQERVDTVNHLADELINSGHSDAATIAEWKDGLNEAWADLLELIDTRTQILAASYELHKFYHDAKEIFGRIQDKHKKLPEELGRDQNTVETLQRMHTTFEHDIQALGTQVRQLQEDAARLQAAYAGDKADDIQKRENEVLEAWKSLLDACESRRVRLVDTGDKFRFFSMVRDLMLWMEDVIRQIEAQEKPRDVSSVELLMNNHQGIKAEIDARNDSFTTCIELGKSLLARKHYASEEIKEKLLQLTEKRKEMIDKWEDRWEWLRLILEVHQFSRDASVAEAWLLGQEPYLSSREIGQSVDEVEKLIKRHEAFEKSAATWDERFSALERLTTLELLEVRRQQEEEERKRRPPSPEPSTKVSEEAESQQQWDTSKGEQVSQNGLPAEQGSPRMAETVDTSEMVNGATEQRTSSKESSPIPSPTSDRKAKTALPAQSAATLPARTQETPSAQMEGFLNRKHEWEAHNKKASSRSWHNVYCVINNQEMGFYKDAKTAASGIPYHSEVPVSLKEAVCEVALDYKKKKHVFKLRLNDGNEYLFQAKDDEEMNTWIQAISSAISSDKHEVSASTQSTPASSRAQTLPTSVVTITSESSPGKREKDKEKDKEKRFSLFGKKK

SEQ ID NO: 18022 - protein, 837 aa, Artificial Sequence
  Synthetic polypeptide
PGLVEGMQLISEKPETEAVVKEKLTGLHKMWEVLESTTQTKAQRLFDANKAELFTQSCADLDKWLHGLESQIQSDDYGKDLTSVNILLKKQQMLENQMEVRKKEIEELQSQAQALSQEGKSTDEVDSKRLTVQTKFMELLEPLNERKHNLLASKEIHQFNRDVEDEILWVGERMPLATSTDHGHNLQTVQLLIKKNQTLQKEIQGHQPRIDDIFERSQNIVTDSSSLSAEAIRQRLADLKQLWGLLIEETEKRHRRLEEAHRAQQYYFDAAEAEAWMSEQELYMMSEEKAKDEQSAVSMLKKHQILEQAVEDYAETVHQLSKTSRALVADSHPESERISMRQSKVDKLYAGLKDLAEERRGKLDERHRLFQLNREVDDLEQWIAEREVVAGSHELGQDYEHVTMLQERFREFARDTGNIGQERVDTVNHLADELINSGHSDAATIAEWKDGLNEAWADLLELIDTRTQILAASYELHKFYHDAKEIFGRIQDKHKKLPEELGRDQNTVETLQRMHTTFEHDIQALGTQVRQLQEDAARLQAAYAGDKADDIQKRENEVLEAWKSLLDACESRRVRLVDTGDKFRFFSMVRDLMLWMEDVIRQIEAQEKPRDVSSVELLMNNHQGIKAEIDARNDSFTTCIELGKSLLARKHYASEEIKEKLLQLTEKRKEMIDKWEDRWEWLRLILEVHQFSRDASVAEAWLLGQEPYLSSREIGQSVDEVEKLIKRHEAFEKSAATWDERFSALERLTTLELLEVRRQQEEEERKRRPPSPEPSTKVSEEAESQQQWDTSKGEQVSQNGLPAEQGSPRVSYRSQTYQNYKNFNSRRTASDQPWSGL

SEQ ID NO: 18023 - protein, 64 aa, Artificial Sequence
  Synthetic polypeptide
QGTVAHACNPSTLGGQGRWITGGQEFQTSLANMVKPHLYEAYKNSQAWWKECSSFQKSLRRKLW

SEQ ID NO: 18024 - protein, 193 aa, Artificial Sequence
  Synthetic polypeptide
EMPFTSCHDSEASPAMWNFVDLLYWRDIKKTGVVFGASLFLLLSLTVFSIVSVTAYIALALLSVTISFRIYKGVIQAIQKSDEGHPFRAYLESEVAISEELVQKYSNSALGHVNCTIKELRRLFLVDDLVDSLKFAVLMWVFTYVGALFNGLTLLILALISLFSVPVIYERHQAQIDHYLGLANKNVKDAMAK

SEQ ID NO: 18025 - protein, 206 aa, Artificial Sequence
  Synthetic polypeptide
EMPFTSCHDSEASPAMWNFVDLLYWRDIKKTGVVFGASLFLLLSLTVFSIVSVTAYIALALLSVTISFRIYKGVIQAIQKSDEGHPFRAYLESEVAISEELVQKYSNSALGHVNCTIKELRRLFLVDDLVDSLKFAVLMWVFTYVGALFNGLTLLILALISLFSVPVIYERHQAQIDHYLGLANKNVKDAMAKIQAKIPGLKRKAE

SEQ ID NO: 18026 - protein, 9 aa, Artificial Sequence
  Synthetic polypeptide
GLPSHVELC

SEQ ID NO: 18027 - protein, 72 aa, Artificial Sequence
  Synthetic polypeptide
VSLTRADGFIRGFRFCIFFIFLLPLPCKKCLLPPAMILRPPQPCGTLLTSCTGETLRRLEWCLVPAYSCCFH

SEQ ID NO: 18028 - protein, 23 aa, Artificial Sequence
  Synthetic polypeptide
NGRALALCQTFQNSWDPWTEGIC

SEQ ID NO: 18029 - protein, 27 aa, Artificial Sequence
  Synthetic polypeptide
QFVEMEEHWLCARHFRTPGTLGQRGYA

SEQ ID NO: 18030 - protein, 28 aa, Artificial Sequence
  Synthetic polypeptide
QFVEMEEHWLCARHFRTPGTLGQRGYAK

SEQ ID NO: 18031 - protein, 27 aa, Artificial Sequence
  Synthetic polypeptide
SLLKWKSTGFVPDISELLGPLDRGDML

SEQ ID NO: 18032 - protein, 123 aa, Artificial Sequence
  Synthetic polypeptide
SLLKWKSTGFVPDISELLGPLDRGDMLNEAFIGLSLAPQGEDSFPDNLPPSCPTHRHILQQRILNGSSNRQIIDRRNELEKDICSGFLMTNTCNAEDGELREDGREQEIRDGGSLKMIHFGLV

SEQ ID NO: 18033 - protein, 28 aa, Artificial Sequence
  Synthetic polypeptide
FLCSPLNANMKKFNEAQNSWDPWTEGIC

SEQ ID NO: 18034 - protein, 14 aa, Artificial Sequence
  Synthetic polypeptide
GSELLGPLDRGDML

SEQ ID NO: 18035 - protein, 110 aa, Artificial Sequence
  Synthetic polypeptide
GSELLGPLDRGDMLNEAFIGLSLAPQGEDSFPDNLPPSCPTHRHILQQRILNGSSNRQIIDRRNELEKDICSGFLMTNTCNAEDGELREDGREQEIRDGGSLKMIHFGLV

SEQ ID NO: 18036 - protein, 18 aa, Artificial Sequence
  Synthetic polypeptide
KNSMRLRTPGTLGQRGYA

SEQ ID NO: 18037 - protein, 19 aa, Artificial Sequence
  Synthetic polypeptide
KNSMRLRTPGTLGQRGYAK

SEQ ID NO: 18038 - protein, 14 aa, Artificial Sequence
  Synthetic polypeptide
GLPSHMELIFITLH

SEQ ID NO: 18039 - protein, 187 aa, Artificial Sequence
  Synthetic polypeptide
VSQDLMGLSVVSVFASSSFFLLPRPCKKCLSPPVMILRPPQPYGADIHYLALDKGELALAEVARKRASDIDAESITSGVELLGPLDRGDMLNEAFIGLSLAPQGEDSFPDNLPPSCPTHRHILQQRILNGSSNRQIIDRRNELEKDICSGFLMTNTCNAEDGELREDGREQEIRDGGSLKMIHFGLV

SEQ ID NO: 18040 - protein, 41 aa, Artificial Sequence
  Synthetic polypeptide
AKIVSLCSSPDRDIGIYQYYDKKDPPARDYPWTLKNRRPEK

SEQ ID NO: 18041 - protein, 575 aa, Artificial Sequence
  Synthetic polypeptide
AKIVSLCSSPDRDIGIYQYYDKKDPPATEHGNLEKKQKLAESRDYPWTLKNRRPEKLRDSLKELEELMQNSRCVLSKWKNKYVCQLLFGSGVLVSLSLSGPQLEKVVIDRSLVGKLISDTISDALLTDSFIILSFLAQNKLCFIQFTKKMESSDVNKRLEKLSALDYKIFYYEIPGPINKTTERHLAINCVHDRVVCWWPLVNDDAWPWAPISSEKDRANLLLLGYAQGRLEVLSSVRTEWDPLDVRFGTKQPYQVFTVEHSVSVDKEPMADSCIYECIRNKIQCVSVTRIPLKSKAISCCRNVTEDKLILGCEDSSLILYETHRRVTLLAQTELLPSLISCHPSGAILLVGSNQGELQIFDMALSPINIQLLAEDRLPRETLQFSKLFDASSSLVQMQWIAPQVVSQKGEGSDIYDLLFLRFERGPLGVLLFKLGVFTRGQLGLIDIIFQYIHCDEIYEAINILSSMNWDTLGHQCFISMSAIVNHLLRQKLTPEREAQLETSLGTFYAPTRPLLDSTILEYRDQISKYARRFFHHLLRYQRFEKAFLLAVDVGARDLFMASCYLTSNYTTRLQ

SEQ ID NO: 18042 - protein, 703 aa, Artificial Sequence
  Synthetic polypeptide
AKIVSLCSSPDRDIGIYQYYDKKDPPATEHGNLEKKQKLAESRDYPWTLKNRRPEKLRDSLKELEELMQNSRCVLSKWKNKYVCQLLFGSGVLVSLSLSGPQLEKVVIDRSLVGKLISDTISDALLTDSFIILSFLAQNKLCFIQFTKKMESSDVNKRLEKLSALDYKIFYYEIPGPINKTTERHLAINCVHDRVVCWWPLVNDDAWPWAPISSEKDRANLLLLGYAQGRLEVLSSVRTEWDPLDVRFGTKQPYQVFTVEHSVSVDKEPMADSCIYECIRNKIQCVSVTRIPLKSKAISCCRNVTEDKLILGCEDSSLILYETHRRVTLLAQTELLPSLISCHPSGAILLVGSNQGELQIFDMALSPINIQLLAEDRLPRETLQFSKLFDASSSLVQMQWIAPQVVSQKGEGSDIYDLLFLRFERGPLGVLLFKLGVFTRGQLGLIDIIFQYIHCDEIYEAINILSSMNWDTLGHQCFISMSAIVNHLLRQKLTPEREAQLETSLGTFYAPTRPLLDSTILEYRDQISKYARRFFHHLLRYQRFEKAFLLAVDVGARDLFMDIHYLALDKGELALAEVARKRASDIDAESITSGVELLGPLDRGDMLNEAFIGLSLAPQGEDSFPDNLPPSCPTHRHILQQRILNGSSNRQIIDRRNELEKDICSGFLMTNTCNAEDGELREDGREQEIRDGGSLKMIHFGLV

SEQ ID NO: 18043 - protein, 90 aa, Artificial Sequence
  Synthetic polypeptide
AKIVSLCSSPDRDIGIYQYYDKKDPPATEHGNLEKKQKLAESRDYPWTLKNRRPEKLRDSLKELEELMQNSRCVLSKWKNKYVCQVCWCL

SEQ ID NO: 18044 - protein, 2 aa, Artificial Sequence
  Synthetic polypeptide
PR

SEQ ID NO: 18045 - protein, 45 aa, Artificial Sequence
  Synthetic polypeptide
RCSEPRSCHYALAQIETLGSTSIMTRKIHQHEIILGRSKTDAQKN

SEQ ID NO: 18046 - protein, 36 aa, Artificial Sequence
  Synthetic polypeptide
RCSEPRSCHYALAQIETLGSTSIMTRKIHQRQSMVT

SEQ ID NO: 18047 - protein, 8 aa, Artificial Sequence
  Synthetic polypeptide
GMENSRNG

SEQ ID NO: 18048 - protein, 31 aa, Artificial Sequence
  Synthetic polypeptide
KEMIPDGNLDLRNGELQKWIEIPSAIRCLSA

SEQ ID NO: 18049 - protein, 84 aa, Artificial Sequence
  Synthetic polypeptide
RKFFRLKGNDTRWKLGSEEWRTPEMDRDSFCHQMSFCLTELHLWSLKNTLHIADRDIGIYQYYDKKDPPARDYPWTLKNRRPEK

SEQ ID NO: 18050 - protein, 618 aa, Artificial Sequence
  Synthetic polypeptide
RKFFRLKGNDTRWKLGSEEWRTPEMDRDSFCHQMSFCLTELHLWSLKNTLHIADRDIGIYQYYDKKDPPATEHGNLEKKQKLAESRDYPWTLKNRRPEKLRDSLKELEELMQNSRCVLSKWKNKYVCQLLFGSGVLVSLSLSGPQLEKVVIDRSLVGKLISDTISDALLTDSFIILSFLAQNKLCFIQFTKKMESSDVNKRLEKLSALDYKIFYYEIPGPINKTTERHLAINCVHDRVVCWWPLVNDDAWPWAPISSEKDRANLLLLGYAQGRLEVLSSVRTEWDPLDVRFGTKQPYQVFTVEHSVSVDKEPMADSCIYECIRNKIQCVSVTRIPLKSKAISCCRNVTEDKLILGCEDSSLILYETHRRVTLLAQTELLPSLISCHPSGAILLVGSNQGELQIFDMALSPINIQLLAEDRLPRETLQFSKLFDASSSLVQMQWIAPQVVSQKGEGSDIYDLLFLRFERGPLGVLLFKLGVFTRGQLGLIDIIFQYIHCDEIYEAINILSSMNWDTLGHQCFISMSAIVNHLLRQKLTPEREAQLETSLGTFYAPTRPLLDSTILEYRDQISKYARRFFHHLLRYQRFEKAFLLAVDVGARDLFMASCYLTSNYTTRLQ

SEQ ID NO: 18051 - protein, 746 aa, Artificial Sequence
  Synthetic polypeptide
RKFFRLKGNDTRWKLGSEEWRTPEMDRDSFCHQMSFCLTELHLWSLKNTLHIADRDIGIYQYYDKKDPPATEHGNLEKKQKLAESRDYPWTLKNRRPEKLRDSLKELEELMQNSRCVLSKWKNKYVCQLLFGSGVLVSLSLSGPQLEKVVIDRSLVGKLISDTISDALLTDSFIILSFLAQNKLCFIQFTKKMESSDVNKRLEKLSALDYKIFYYEIPGPINKTTERHLAINCVHDRVVCWWPLVNDDAWPWAPISSEKDRANLLLLGYAQGRLEVLSSVRTEWDPLDVRFGTKQPYQVFTVEHSVSVDKEPMADSCIYECIRNKIQCVSVTRIPLKSKAISCCRNVTEDKLILGCEDSSLILYETHRRVTLLAQTELLPSLISCHPSGAILLVGSNQGELQIFDMALSPINIQLLAEDRLPRETLQFSKLFDASSSLVQMQWIAPQVVSQKGEGSDIYDLLFLRFERGPLGVLLFKLGVFTRGQLGLIDIIFQYIHCDEIYEAINILSSMNWDTLGHQCFISMSAIVNHLLRQKLTPEREAQLETSLGTFYAPTRPLLDSTILEYRDQISKYARRFFHHLLRYQRFEKAFLLAVDVGARDLFMDIHYLALDKGELALAEVARKRASDIDAESITSGVELLGPLDRGDMLNEAFIGLSLAPQGEDSFPDNLPPSCPTHRHILQQRILNGSSNRQIIDRRNELEKDICSGFLMTNTCNAEDGELREDGREQEIRDGGSLKMIHFGLV

SEQ ID NO: 18052 - protein, 133 aa, Artificial Sequence
  Synthetic polypeptide
RKFFRLKGNDTRWKLGSEEWRTPEMDRDSFCHQMSFCLTELHLWSLKNTLHIADRDIGIYQYYDKKDPPATEHGNLEKKQKLAESRDYPWTLKNRRPEKLRDSLKELEELMQNSRCVLSKWKNKYVCQVCWCL

SEQ ID NO: 18053 - protein, 178 aa, Artificial Sequence
  Synthetic polypeptide
EWLRLYDMLGNEASYPLEMCSHFDADEIKRLGKRFKKLDLDNSGSLSVEEFMSLPELQQNPLVQRVIDIFDTDGNGEVDFKEFIEGVSQFSVKGDKEQKLRFAFRIYDMDKDGYISNGELFQVLKMMVGNNLKDTQLQQIVDKTIINADKDGDGRISFEEFCAVVGGLDIHKKMVVDV

SEQ ID NO: 18054 - protein, 31 aa, Artificial Sequence
  Synthetic polypeptide
QNGCGFMICWEMRQVILWKCAHTLMRMKLKG

SEQ ID NO: 18055 - protein, 4 aa, Artificial Sequence
  Synthetic polypeptide
YVGK

SEQ ID NO: 18056 - protein, 17 aa, Artificial Sequence
  Synthetic polypeptide
ASWGQGLPSPVWHQAHG

SEQ ID NO: 18057 - protein, 421 aa, Artificial Sequence
  Synthetic polypeptide
PLKSELPGDRDCLLQYGTRHMANRSRDLGAIVYCVGVKDFNETQLARIADSKDHVFPVNDGFQALQGIIHSILKKSCIEILAAEPSTICAGESFQVVVRGNGFRHARNVDRVLCSFKINDSVTLNEKPFSVEDTYLLCPAPILKEVGMKAALQVSMNDGLSFISSSVIITTTHCSDGSILAIALLILFLLLALALLWWFWPLCCTVIIKEVPPPPAEESEEEDDDGLPKKKWPTVDASYYGGRGVGGIKRMEVRWGEKGSTEEGAKLEKAKNARVKMPEQEYEFPEPRNLNNNMRRPSSPRKWYSPIKGKLDALWVLLRKGYDRVSVMRPQPGDTGRCINFTRVKNNQPAKYPLNNAYHTSSPPPAPIYTPPPPAPHCPPPPPSAPTPPIPSPPSTLPPPPQAPPPNRAPPPSRPPPRPSV

SEQ ID NO: 18058 - protein, 225 aa, Artificial Sequence
  Synthetic polypeptide
PLKSELPGDRDCLLQYGTRHMANRSRDLGAIVYCVGVKDFNETQLARIADSKDHVFPVNDGFQALQGIIHSILKKSCIEILAAEPSTICAGESFQVVVRGNGFRHARNVDRVLCSFKINDSVTLNEKPFSVEDTYLLCPAPILKEVGMKAALQVSMNDGLSFISSSVIITTTHCSDGSILAIALLILFLLLALALLWWFWPLCCTVIIKEVPPPPAEESEENKIK

SEQ ID NO: 18059 - protein, 190 aa, Artificial Sequence
  Synthetic polypeptide
PLKSELPGDRDCLLQYGTRHMANRSRDLGAIVYCVGVKDFNETQLARIADSKDHVFPVNDGFQALQGIIHSILKKSCIEILAAEPSTICAGESFQVVVRGNGFRHARNVDRVLCSFKINDSVTLNEKPFSVEDTYLLCPAPILKEVGMKAALQVSMNDGLSFISSSVIITTTHCSLHKIASGPTTAACME

SEQ ID NO: 18060 - protein, 34 aa, Artificial Sequence
  Synthetic polypeptide
SLSFLGTGIAFSSMAPGTWLIGLEILVQLFTVLV

SEQ ID NO: 18061 - protein, 24 aa, Artificial Sequence
  Synthetic polypeptide
LSWIFLSFYNDWPGLRTVRIMCFP

SEQ ID NO: 18062 - protein, 11 aa, Artificial Sequence
  Synthetic polypeptide
VFTMTGPDCGQ

SEQ ID NO: 18063 - protein, 21 aa, Artificial Sequence
  Synthetic polypeptide
CSFSFAMLLYKDAQISLWNGF

SEQ ID NO: 18064 - protein, 142 aa, Artificial Sequence
  Synthetic polypeptide
GCPDFSLEWILKKSCIEILAAEPSTICAGESFQVVVRGNGFRHARNVDRVLCSFKINDSVTLNEKPFSVEDTYLLCPAPILKEVGMKAALQVSMNDGLSFISSSVIITTTHCDGLWFYIQSLETVKDHRNIRVRNSDLKYCL

SEQ ID NO: 18065 - protein, 359 aa, Artificial Sequence
  Synthetic polypeptide
GCPDFSLEWILKKSCIEILAAEPSTICAGESFQVVVRGNGFRHARNVDRVLCSFKINDSVTLNEKPFSVEDTYLLCPAPILKEVGMKAALQVSMNDGLSFISSSVIITTTHCSDGSILAIALLILFLLLALALLWWFWPLCCTVIIKEVPPPPAEESEEEDDDGLPKKKWPTVDASYYGGRGVGGIKRMEVRWGEKGSTEEGAKLEKAKNARVKMPEQEYEFPEPRNLNNNMRRPSSPRKWYSPIKGKLDALWVLLRKGYDRVSVMRPQPGDTGRCINFTRVKNNQPAKYPLNNAYHTSSPPPAPIYTPPPPAPHCPPPPPSAPTPPIPSPPSTLPPPPQAPPPNRAPPPSRPPPRPSV

SEQ ID NO: 18066 - protein, 163 aa, Artificial Sequence
  Synthetic polypeptide
GCPDFSLEWILKKSCIEILAAEPSTICAGESFQVVVRGNGFRHARNVDRVLCSFKINDSVTLNEKPFSVEDTYLLCPAPILKEVGMKAALQVSMNDGLSFISSSVIITTTHCSDGSILAIALLILFLLLALALLWWFWPLCCTVIIKEVPPPPAEESEENKIK

SEQ ID NO: 18067 - protein, 128 aa, Artificial Sequence
  Synthetic polypeptide
GCPDFSLEWILKKSCIEILAAEPSTICAGESFQVVVRGNGFRHARNVDRVLCSFKINDSVTLNEKPFSVEDTYLLCPAPILKEVGMKAALQVSMNDGLSFISSSVIITTTHCSLHKIASGPTTAACME

SEQ ID NO: 18068 - protein, 31 aa, Artificial Sequence
  Synthetic polypeptide
VHFLSQCFSIRMPRFLSGMDFEEVLHRNSSS

SEQ ID NO: 18069 - protein, 90 aa, Artificial Sequence; identical to SEQ ID NO: 3754
  Synthetic polypeptide

SEQ ID NO: 18070 - protein, 89 aa, Artificial Sequence; identical to SEQ ID NO: 3771
  Synthetic polypeptide

SEQ ID NO: 18071 - protein, 90 aa, Artificial Sequence; identical to SEQ ID NO: 3753
  Synthetic polypeptide

SEQ ID NO: 18072 - protein, 91 aa, Artificial Sequence
  Synthetic polypeptide
DTDPPVAAAVVSHFNDCPDSHTQFCFHGTCRFLVQEDKPACVCHSGYVGARCEHADLLAVVAASQKKQAITALVVVSIVALAVLIITCVLI

SEQ ID NO: 18073 - protein, 132 aa, Artificial Sequence
  Synthetic polypeptide
DTDPPVAAAVVSHFNDCPDSHTQFCFHGTCRFLVQEDKPACVCHSGYVGARCEHADLLAVVAASQKKQAITALVVVSIVALAVLIITCVLIHCCQVRKHCEWCRALICRHEKPSALLKGRTACCHSETATLG

SEQ ID NO: 18074 - protein, 133 aa, Artificial Sequence
  Synthetic polypeptide
DTDPPVAAAVVSHFNDCPDSHTQFCFHGTCRFLVQEDKPACVCHSGYVGARCEHADLLAVVAASQKKQAITALVVVSIVALAVLIITCVLIHCCQVRKHCEWCRALICRHEKPSALLKGRTACCHSETGCRLY

SEQ ID NO: 18075 - protein, 130 aa, Artificial Sequence
  Synthetic polypeptide
DTDPPVAAAVVSHFNDCPDSHTQFCFHGTCRFLVQEDKPACVCHSGYVGARCEHADLLAVVAASQKKQAITALVVVSIVALAVLIITCVLIHCCQVRKHCEWCRALICRHEKPSALLKGRTACCHSETVV

SEQ ID NO: 18076 - protein, 104 aa, Artificial Sequence; identical to SEQ ID NO: 3565
  Synthetic polypeptide

SEQ ID NO: 18077 - protein, 30 aa, Artificial Sequence; identical to SEQ ID NO: 6498
  Synthetic polypeptide

SEQ ID NO: 18078 - protein, 131 aa, Artificial Sequence
  Synthetic polypeptide
DTADPPVAAAVVSHFNDCPDSHTQFCFHGTCRFLVQEDKPACVCHSGYVGARCEHADLLAVVAASQKKQAITALVVVSIVALAVLIITCVLIHCCQVRKHCEWCRALICRHEKPSALLKGRTACCHSETVV

SEQ ID NO: 18079 - protein, 105 aa, Artificial Sequence
  Synthetic polypeptide
ENIRKALRTGRGLHRTQQTRPWLQQWCPILMTAQIPTLSSASMEPAGFWCRRTSQHVSAILGTLVHAVSMRTSWPWWLPARRSRPSPPWWWSPSWPWLSLSSHVC

SEQ ID NO: 18080 - protein, 31 aa, Artificial Sequence
  Synthetic polypeptide
NERIYVKHLEQGEAYIGHSRPARGCSSGVPF

SEQ ID NO: 18081 - protein, 46 aa, Artificial Sequence
  Synthetic polypeptide
AQGSPFSPSATEGQPPMSQGESPHQKQNLSVSGSWTSQLPELCHTT

SEQ ID NO: 18082 - protein, 37 aa, Artificial Sequence
  Synthetic polypeptide
ARERVLTRNRICQCLDLGLPSYQNYATPHEALAILQL

SEQ ID NO: 18083 - protein, 103 aa, Artificial Sequence
  Synthetic polypeptide
GTATHEPGRESSPETESVSVWILDFPATRTMPHHMKPLPYYSYDQPVIGYCQAHQPLHVTKGYETVSPEQDESPGLELGRDHSFIATIARSAAPAIYLERIAN

SEQ ID NO: 18084 - protein, 47 aa, Artificial Sequence
  Synthetic polypeptide
KGSSSYASCQQGQVEWALCSAPWGSALQDIIHWAIKGCQFGLFHLQQ

SEQ ID NO: 18085 - protein, 96 aa, Artificial Sequence
  Synthetic polypeptide
KVANLACSISNNEEGVKLVRMAATQIDSLCPQVINAALTLAARPQSKVAQDNMDVFKDQWEKQVRVLTEAVDDITSVDDFLSVSENHILEDVNKCV

SEQ ID NO: 18086 - protein, 476 aa, Artificial Sequence
  Synthetic polypeptide
KVANLACSISNNEEGVKLVRMAATQIDSLCPQVINAALTLAARPQSKVAQDNMDVFKDQWEKQVRVLTEAVDDITSVDDFLSVSENHILEDVNKCVIALQEGDVDTLDRTAGAIRGRAARVIHIINAEMENYEAGVYTEKVLEATKLLSETVMPRFAEQVEVAIEALSANVPQPFEENEFIDASRLVYDGVRDIRKAVLMIRTPEELEDDSDFEQEDYDVRSRTSVQTEDDQLIAGQSARAIMAQLPQEEKAKIAEQVEIFHQEKSKLDAEVAKWDDSGNDIIVLAKQMCMIMMEMTDFTRGKGPLKNTSDVINAAKKIAEAGSRMDKLARAVADQCPDSACKQDLLAYLQRIALYCHQLNICSKVKAEVQNLGGELIVSGLDSATSLIQAAKNLMNAVVLTVKASYVASTKYQKVYGTAAVNSPVVSWKMKAPEKKPLVKREKPEEFQTRVRRGSQKKHISPVQALSEFKAMDSF

SEQ ID NO: 18087 - protein, 524 aa, Artificial Sequence
  Synthetic polypeptide
KVANLACSISNNEEGVKLVRMAATQIDSLCPQVINAALTLAARPQSKVAQDNMDVFKDQWEKQVRVLTEAVDDITSVDDFLSVSENHILEDVNKCVIALQEGDVDTLDRTAGAIRGRAARVIHIINAEMENYEAGVYTEKVLEATKLLSETVMPRFAEQVEVAIEALSANVPQPFEENEFIDASRLVYDGVRDIRKAVLMIRTPEELEDDSDFEQEDYDVRSRTSVQTEDDQLIAGQSARAIMAQLPQEEKAKIAEQVEIFHQEKSKLDAEVAKWDDSGNDIIVLAKQMCMIMMEMTDFTRGKGPLKNTSDVINAAKKIAEAGSRMDKLARAVADQCPDSACKQDLLAYLQRIALYCHQLNICSKVKAEVQNLGGELIVSGTGVQSTFTTFYEVDCDVIDGGRASQLSTHLPTCAEGAPIGSGSSDSSMLDSATSLIQAAKNLMNAVVLTVKASYVASTKYQKVYGTAAVNSPVVSWKMKAPEKKPLVKREKPEEFQTRVRRGSQKKHISPVQALSEFKAMDSF

SEQ ID NO: 18088 - protein, 431 aa, Artificial Sequence
  Synthetic polypeptide
KVANLACSISNNEEGVKLVRMAATQIDSLCPQVINAALTLAARPQSKVAQDNMDVFKDQWEKQVRVLTEAVDDITSVDDFLSVSENHILEDVNKCVIALQEGDVDTLDRTAGAIRGRAARVIHIINAEMENYEAGVYTEKVLEATKLLSETVMPRFAEQVEVAIEALSANVPQPFEENEFIDASRLVYDGVRDIRKAVLMIRTPEELEDDSDFEQEDYDVRSRTSVQTEDDQLIAGQSARAIMAQLPQEEKAKIAEQVEIFHQEKSKLDAEVAKWDDSGNDIIVLAKQMCMIMMEMTDFTRGKGPLKNTSDVINAAKKIAEAGSRMDKLARAVADQLDSATSLIQAAKNLMNAVVLTVKASYVASTKYQKVYGTAAVNSPVVSWKMKAPEKKPLVKREKPEEFQTRVRRGSQKKHISPVQALSEFKAMDSF

SEQ ID NO: 18089 - protein, 36 aa, Artificial Sequence
  Synthetic polypeptide
VGFVLSPLGICFARHHSLGNKRLPIWPVPSPTMKKG

SEQ ID NO: 18090 - protein, 62 aa, Artificial Sequence
  Synthetic polypeptide
FHKGLFPLLLSTSPSCCHVTKDMFASSSAMVVSFLRPPQPFKTVISWATTQCWMFCGVKAMR

SEQ ID NO: 18091 - protein, 215 aa, Artificial Sequence
  Synthetic polypeptide
GAFPPFAQHFSFLLPCDEGHVCFLFCHGCKFPEASSALQNRHFMGNNTVLDVLRREGYEVEHAPAGRPIHKGKSKKTSTRPTLSTIFAPKVPTLEVPAPEAVSSGHSTLPPLVSRPGSADTPSEAEQRFRKKRRRSQRRPRLRQFSDLWVRLEESDIVPQLQVPVLDRHISTELRLPRRGHSHHSQMVASSACLSLWTPVFWVLVLAFQTETPLL

SEQ ID NO: 18092 - protein, 22 aa, Artificial Sequence
  Synthetic polypeptide
GLLSPSKPSFHGQQHSAGCFAA

SEQ ID NO: 18093 - protein, 153 aa, Artificial Sequence
  Synthetic polypeptide
FHKGLFPLLLSTSPSCCHVTKDMFASSSAMVVSFLRPPQPFKTVIFALNQTLLQQESLRAGSLQIPYTTEDLIKHYNCGDLSSVILSHDSSQVPNFINATLPPQERITAQEIDSYLRRELIYKRNERIGKRVKALLEEFPDKGFFFAFGAASQ

SEQ ID NO: 18094 - protein, 325 aa, Artificial Sequence
  Synthetic polypeptide
FHKGLFPLLLSTSPSCCHVTKDMFASSSAMVVSFLRPPQPFKTVIFALNQTLLQQESLRAGSLQIPYTTEDLIKHYNCGDLSSVILSHDSSQVPNFINATLPPQERITAQEIDSYLRRELIYKRNERIGKRVKALLEEFPDKGFFFAFGAGHFMGNNTVLDVLRREGYEVEHAPAGRPIHKGKSKKTSTRPTLSTIFAPKVPTLEVPAPEAVSSGHSTLPPLVSRPGSADTPSEAEQRFRKKRRRSQRRPRLRQFSDLWVRLEESDIVPQLQVPVLDRHISTELRLPRRGHSHHSQMVASSACLSLWTPVFWVLVLAFQTETPLL

SEQ ID NO: 18095 - protein, 73 aa, Artificial Sequence
  Synthetic polypeptide
GAFPPFAQHFSFLLPCDEGHVCFLFCHGCKFPEASSALQNRHLCFEPDPPAAGKPASRQSSDPLHDGGSHQTL

SEQ ID NO: 18096 - protein, 12 aa, Artificial Sequence
  Synthetic polypeptide
GLLSPSKPSSLL

SEQ ID NO: 18097 - protein, 109 aa, Artificial Sequence; identical to SEQ ID NO: 3502
  Synthetic polypeptide

SEQ ID NO: 18098 - protein, 110 aa, Artificial Sequence; identical to SEQ ID NO: 3497
  Synthetic polypeptide

SEQ ID NO: 18099 - protein, 10 aa, Artificial Sequence
  Synthetic polypeptide
DQPGQHGGSQ

SEQ ID NO: 18100 - protein, 49 aa, Artificial Sequence; identical to SEQ ID NO: 5238
  Synthetic polypeptide

SEQ ID NO: 18101 - protein, 11 aa, Artificial Sequence
  Synthetic polypeptide
AGVEDPSVCRV

SEQ ID NO: 18102 - protein, 40 aa, Artificial Sequence
  Synthetic polypeptide
AHLEPAPLSPRVCPPKGRFCCQCCTLGCKQVSRTPQCAGS

SEQ ID NO: 18103 - protein, 85 aa, Artificial Sequence
  Synthetic polypeptide
AHLEPAPLSPRVCPPKGRFCCQCCTLGCKQVSRTPQCAGSEHFKTTSQKVARKFWWKNVKMIVLICVIVFIIILFIVLFATGAFS

SEQ ID NO: 18104 - protein, 40 aa, Artificial Sequence
  Synthetic polypeptide
PTWSLHPSVPGSALPRADFAASVVPLGVSRCRGPLSVQGL

SEQ ID NO: 18105 - protein, 58 aa, Artificial Sequence
  Synthetic polypeptide
PTWSLHPSVPGSALPRADFAASVVPLGVSRCRGPLSVQGLSTSRRHRRRWLENSGGRT

SEQ ID NO: 18106 - protein, 7 aa, Artificial Sequence
  Synthetic polypeptide
EGTFVKS

SEQ ID NO: 18107 - protein, 52 aa, Artificial Sequence; identical to SEQ ID NO: 5074
  Synthetic polypeptide

SEQ ID NO: 18108 - protein, 16 aa, Artificial Sequence
  Synthetic polypeptide
ISTRPSRFLGRYICQV

SEQ ID NO: 18109 - protein, 25 aa, Artificial Sequence
  Synthetic polypeptide
PPRILRILNFNPAFQIFRKVHLSSL

SEQ ID NO: 18110 - protein, 43 aa, Artificial Sequence; identical to SEQ ID NO: 5542
  Synthetic polypeptide

SEQ ID NO: 18111 - protein, 29 aa, Artificial Sequence
  Synthetic polypeptide
ASFSASVKWGRNRVGAVPAAGERGDGNYA

SEQ ID NO: 18112 - protein, 21 aa, Artificial Sequence
  Synthetic polypeptide
PGTSHLTSLSLLFRVCEVGQE

SEQ ID NO: 18113 - protein, 117 aa, Artificial Sequence
  Synthetic polypeptide
SGAGIELERCQQQANEVTEIMRNNFGKVLERGVKLAELQQRSDQLLDMSSTFNKTTQNLAQKKCWENIRYRICVGLVVVGVLLIILIVLLVVFLPQSSDSSSAPRTQDAGIASGPGN

SEQ ID NO: 18114 - protein, 18 aa, Artificial Sequence
  Synthetic polypeptide
PGLWSNRETSPAFRRDTS

SEQ ID NO: 18115 - protein, 53 aa, Artificial Sequence; identical to SEQ ID NO: 5022
  Synthetic polypeptide

SEQ ID NO: 18116 - protein, 38 aa, Artificial Sequence; identical to SEQ ID NO: 5928
  Synthetic polypeptide

SEQ ID NO: 18117 - protein, 28 aa, Artificial Sequence
  Synthetic polypeptide
PGNRRRVCKCPRPVVKSGDKPSLSARYV

SEQ ID NO: 18118 - protein, 63 aa, Artificial Sequence; identical to SEQ ID NO: 4544
  Synthetic polypeptide

SEQ ID NO: 18119 - protein, 49 aa, Artificial Sequence; identical to SEQ ID NO: 5211
  Synthetic polypeptide

SEQ ID NO: 18120 - protein, 33 aa, Artificial Sequence
  Synthetic polypeptide
GYHRRNCVDAVSRHPVFVSRGKSHPLLQGQSEC

SEQ ID NO: 18121 - protein, 123 aa, Artificial Sequence
  Synthetic polypeptide
QNTVSASQTSPCHRLKWLFHPTKDTTGEIVLTQSPGTLSLSPGERATLSCRASQSVSSSYLAWYQQKPGQAPRLLIYGASSRATGIPDRFSGSGSGTDFTLTISRLEPEDFAVYYCQQYGSSP

SEQ ID NO: 18122 - protein, 15 aa, Artificial Sequence
  Synthetic polypeptide
SGCFILLRIPPEKLC

SEQ ID NO: 18123 - protein, 7 aa, Artificial Sequence
  Synthetic polypeptide
KDPVGML

SEQ ID NO: 18124 - protein, 114 aa, Artificial Sequence
  Synthetic polypeptide
LGWGNSCFLKGSSGDVVMTQSPLSLPVTLGQPASISCRSSQSLVYSDGNTYLNWFQQRPGQSPRRLIYKVSNRDSGVPDRFSGSGSGTDFTLKISRVEAEDVGVYYCMQGTHWP

SEQ ID NO: 18125 - protein, 75 aa, Artificial Sequence
  Synthetic polypeptide
NKKRARPNQHVYFRLYEVSYRESQSIWTDVRMPVSLIGMGKQLFPERIQWGCCDDSVSTLPARHPWTAGLHLLQV

SEQ ID NO: 18126 - protein, 54 aa, Artificial Sequence
  Synthetic polypeptide
NSRTPKFVRAQLIAYISLRETRNMGPSGTAASTRRVTGSEKCGRKGNVQLKMVF

SEQ ID NO: 18127 - protein, 44 aa, Artificial Sequence
  Synthetic polypeptide
TSWKRFISINLHDLGLGNSFLDSTLTVQVTNETVGLPNSSEHSL

SEQ ID NO: 18128 - protein, 10 aa, Artificial Sequence
  Synthetic polypeptide
ARQEYWECRL

SEQ ID NO: 18129 - protein, 501 aa, Artificial Sequence
  Synthetic polypeptide
NPISTNNTKISWAWWRVPIVPAAWEPELAKNIGNAGFNEIMECCLPAEDSVKPNPGSDMNARKDYITAKYIERRYARKKHADNAAKLHSLCEAVKTRDIFGLLQAYADGVDLTEKIPLANGHEPDETALHLAVRSVDRTSLHIVDFLVQNSGNLDKQTGKGSTALHYCCLTDNAECLKLLLRGKASIEIANESGETPLDIAKRLKHEHCEELLTQALSGRFNSHVHVEYEWRLLHEDLDESDDDMDEKLQPSPNRREDRPISFYQLGSNQLQSNAVSLARDAANLAKEKQRAFMPSILQNETYGALLSGSPPPAQPAAPSTTSAPPLPPRNVGKDPLTPTPPPPVAKTPSVMEALSQPSKPAPPGISQIRPPPLPPQPPSRLPQKKPAPGADKSTPLTNKGQPRGPVDLSATEALGPLSNAMVLQPPAPMPRKSQATKLKPKRVKALYNCVADNPDELTFSEGDVIIVDGEEDQEWWIGHIDGDPGRKGAFPVSFVHFIAD

SEQ ID NO: 18130 - protein, 546 aa, Artificial Sequence
  Synthetic polypeptide
NPISTNNTKISWAWWRVPIVPAAWEPELAKNIGNAGFNEIMECCLPAEDSVKPNPGSDMNARKDYITAKYIERRYARKKHADNAAKLHSLCEAVKTRDIFGLLQAYADGVDLTEKIPLANGHEPDETALHLAVRSVDRTSLHIVDFLVQNSGNLDKQTGKGSTALHYCCLTDNAECLKLLLRGKASIEIANESGETPLDIAKRLKHEHCEELLTQALSGRFNSHVHVEYEWRLLHEDLDESDDDMDEKLQPSPNRREDRPISFYQLGSNQLQSNAVSLARDAANLAKEKQRAFMPSILQNETYGALLSGSPPPAQPAAPSTTSAPPLPPRNVGKVQTASSANTLWKTNSVSVDGGSRQRSSSDPPAVHPPLPPLRVTSTNPLTPTPPPPVAKTPSVMEALSQPSKPAPPGISQIRPPPLPPQPPSRLPQKKPAPGADKSTPLTNKGQPRGPVDLSATEALGPLSNAMVLQPPAPMPRKSQATKLKPKRVKALYNCVADNPDELTFSEGDVIIVDGEEDQEWWIGHIDGDPGRKGAFPVSFVHFIAD

SEQ ID NO: 18131 - protein, 39 aa, Artificial Sequence
  Synthetic polypeptide
SPLLGNLSSPRILGMQALMRSWNVAYQLRTQSNPTQAAT

SEQ ID NO: 18132 - protein, 62 aa, Artificial Sequence
  Synthetic polypeptide
GGRITSPVPTGGKTGPSASTSWAPTSFSLTLYLWPEMLQTLPRRSRGLSCPASCRMRLTEPS

SEQ ID NO: 18133 - protein, 45 aa, Artificial Sequence
  Synthetic polypeptide
GRARGLTPVIPALWEAEAGGSRAQSQPAGRPAHQLLPAGLQPASV

SEQ ID NO: 18134 - protein, 264 aa, Artificial Sequence
  Synthetic polypeptide
SQHFGRLRRADHEPSPNRREDRPISFYQLGSNQLQSNAVSLARDAANLAKEKQRAFMPSILQNETYGALLSGSPPPAQPAAPSTTSAPPLPPRNVGKDPLTPTPPPPVAKTPSVMEALSQPSKPAPPGISQIRPPPLPPQPPSRLPQKKPAPGADKSTPLTNKGQPRGPVDLSATEALGPLSNAMVLQPPAPMPRKSQATKLKPKRVKALYNCVADNPDELTFSEGDVIIVDGEEDQEWWIGHIDGDPGRKGAFPVSFVHFIAD

SEQ ID NO: 18135 - protein, 309 aa, Artificial Sequence
  Synthetic polypeptide
SQHFGRLRRADHEPSPNRREDRPISFYQLGSNQLQSNAVSLARDAANLAKEKQRAFMPSILQNETYGALLSGSPPPAQPAAPSTTSAPPLPPRNVGKVQTASSANTLWKTNSVSVDGGSRQRSSSDPPAVHPPLPPLRVTSTNPLTPTPPPPVAKTPSVMEALSQPSKPAPPGISQIRPPPLPPQPPSRLPQKKPAPGADKSTPLTNKGQPRGPVDLSATEALGPLSNAMVLQPPAPMPRKSQATKLKPKRVKALYNCVADNPDELTFSEGDVIIVDGEEDQEWWIGHIDGDPGRKGAFPVSFVHFIAD

SEQ ID NO: 18136 - protein, 55 aa, Artificial Sequence
  Synthetic polypeptide
APSLAASVLTLVTLGRSLTLRALWHPRLKGAVILQPCWSVRDKATIIQIPVQNFE

SEQ ID NO: 18137 - protein, 64 aa, Artificial Sequence
  Synthetic polypeptide
ELRSRLSLGPELGRIRPYSGDPGQVTDSSGALASSFERGCYPAALLVGEGQSNNNSDTCAEFRI

SEQ ID NO: 18138 - protein, 83 aa, Artificial Sequence
  Synthetic polypeptide
ELRSRLSLGPELGRIRPYSGDPGQVTDSSGALASSFERGCYPAALLVGEGQSNNNSDTCAEFRIKYVGAIEKLKLSEGKGLEG

SEQ ID NO: 18139 - protein, 85 aa, Artificial Sequence
  Synthetic polypeptide
ELRSRLSLGPELGRIRPYSGDPGQVTDSSGALASSFERGCYPAALLVGEGQSNNNSDTCAEFRIKYVGAIEKLKLSEGKGLEGPL

SEQ ID NO: 18140 - protein, 95 aa, Artificial Sequence
  Synthetic polypeptide
ELRSRLSLGPELGRIRPYSGDPGQVTDSSGALASSFERGCYPAALLVGEGQSNNNSDTCAEFRIKYVGAIEKLKLSEGKGLEGPLDLINYIDVAQ

SEQ ID NO: 18141 - protein, 113 aa, Artificial Sequence
  Synthetic polypeptide
ELRSRLSLGPELGRIRPYSGDPGQVTDSSGALASSFERGCYPAALLVGEGQSNNNSDTCAEFRIKYVGAIEKLKLSEGKGLEGPLDLINYIDVAQQDGKLPFVPPEEEFIMGV

SEQ ID NO: 18142 - protein, 135 aa, Artificial Sequence
  Synthetic polypeptide
ELRSRLSLGPELGRIRPYSGDPGQVTDSSGALASSFERGCYPAALLVGEGQSNNNSDTCAEFRIKYVGAIEKLKLSEGKGLEGPLDLINYIDVAQQDGKLPFVPPEEEFIMGVSKYGIKVSTSDQYDVLHRHALY

SEQ ID NO: 18143 - protein, 199 aa, Artificial Sequence
  Synthetic polypeptide
ELRSRLSLGPELGRIRPYSGDPGQVTDSSGALASSFERGCYPAALLVGEGQSNNNSDTCAEFRIKYVGAIEKLKLSEGKGLEGPLDLINYIDVAQQDGKLPFVPPEEEFIMGVSKYGIKVSTSDQYDVLHRHALYLIIRMVCYDDGLGAGKSLLALKTTDASNEEYSLWVYQCNSLEQAQAICKVLSTAFDSVLTSEKP

SEQ ID NO: 18144 - protein, 183 aa, Artificial Sequence
  Synthetic polypeptide
ELRSRLSLGPELGRIRPYSGDPGQVTDSSGALASSFERGCYPAALLVGEGQSNNNSDTCAEFRIKYVGAIEKLKLSEGKGLEGPLDLINYIDVAQQDGKLPFVPPEEEFIMGVSKYGIKVSTSDQYDVLHRHALYLIIRMVCYDDGLGAGKSLLALKTTDASNEEYSLWVYQCNSLVRLRYFG

SEQ ID NO: 18145 - protein, 149 aa, Artificial Sequence
  Synthetic polypeptide
ELRSRLSLGPELGRIRPYSGDPGQVTDSSGALASSFERGCYPAALLVGEGQSNNNSDTCAEFRIKYVGAIEKLKLSEGKGLEGPLDLINYIDVAQQDGKLPFVPPEEEFIMGVSKYGIKVSTSDQYEQAQAICKVLSTAFDSVLTSEKP

SEQ ID NO: 18146 - protein, 106 aa, Artificial Sequence
  Synthetic polypeptide
ELRSRLSLGPELGRIRPYSGDPGQVTDSSGALASSFERGCYPAALLVGEGQSNNNSDTCAEFRIKYVGAIEKLKLSEGKGLEGPLDLINYIDVAQVKKKNSVTLWL

SEQ ID NO: 18147 - protein, 5 aa, Artificial Sequence
  Synthetic polypeptide
GTKQQ

SEQ ID NO: 18148 - protein, 53 aa, Artificial Sequence
  Synthetic polypeptide
APSLAASVLTLVTLGRSLTLRALWHPRLKGAVILQPCWSDKATIIQIPVQNFE

SEQ ID NO: 18149 - protein, 62 aa, Artificial Sequence
  Synthetic polypeptide
ELRSRLSLGPELGRIRPYSGDPGQVTDSSGALASSFERGCYPAALLVGQSNNNSDTCAEFRI

SEQ ID NO: 18150 - protein, 81 aa, Artificial Sequence
  Synthetic polypeptide
ELRSRLSLGPELGRIRPYSGDPGQVTDSSGALASSFERGCYPAALLVGQSNNNSDTCAEFRIKYVGAIEKLKLSEGKGLEG

SEQ ID NO: 18151 - protein, 83 aa, Artificial Sequence
  Synthetic polypeptide
ELRSRLSLGPELGRIRPYSGDPGQVTDSSGALASSFERGCYPAALLVGQSNNNSDTCAEFRIKYVGAIEKLKLSEGKGLEGPL

SEQ ID NO: 18152 - protein, 93 aa, Artificial Sequence
  Synthetic polypeptide
ELRSRLSLGPELGRIRPYSGDPGQVTDSSGALASSFERGCYPAALLVGQSNNNSDTCAEFRIKYVGAIEKLKLSEGKGLEGPLDLINYIDVAQ

SEQ ID NO: 18153 - protein, 111 aa, Artificial Sequence
  Synthetic polypeptide
ELRSRLSLGPELGRIRPYSGDPGQVTDSSGALASSFERGCYPAALLVGQSNNNSDTCAEFRIKYVGAIEKLKLSEGKGLEGPLDLINYIDVAQQDGKLPFVPPEEEFIMGV

SEQ ID NO: 18154 - protein, 133 aa, Artificial Sequence
  Synthetic polypeptide
ELRSRLSLGPELGRIRPYSGDPGQVTDSSGALASSFERGCYPAALLVGQSNNNSDTCAEFRIKYVGAIEKLKLSEGKGLEGPLDLINYIDVAQQDGKLPFVPPEEEFIMGVSKYGIKVSTSDQYDVLHRHALY

SEQ ID NO: 18155 - protein, 197 aa, Artificial Sequence
  Synthetic polypeptide
ELRSRLSLGPELGRIRPYSGDPGQVTDSSGALASSFERGCYPAALLVGQSNNNSDTCAEFRIKYVGAIEKLKLSEGKGLEGPLDLINYIDVAQQDGKLPFVPPEEEFIMGVSKYGIKVSTSDQYDVLHRHALYLIIRMVCYDDGLGAGKSLLALKTTDASNEEYSLWVYQCNSLEQAQAICKVLSTAFDSVLTSEKP

SEQ ID NO: 18156 - protein, 181 aa, Artificial Sequence
  Synthetic polypeptide
ELRSRLSLGPELGRIRPYSGDPGQVTDSSGALASSFERGCYPAALLVGQSNNNSDTCAEFRIKYVGAIEKLKLSEGKGLEGPLDLINYIDVAQQDGKLPFVPPEEEFIMGVSKYGIKVSTSDQYDVLHRHALYLIIRMVCYDDGLGAGKSLLALKTTDASNEEYSLWVYQCNSLVRLRYFG

SEQ ID NO: 18157 - protein, 147 aa, Artificial Sequence
  Synthetic polypeptide
ELRSRLSLGPELGRIRPYSGDPGQVTDSSGALASSFERGCYPAALLVGQSNNNSDTCAEFRIKYVGAIEKLKLSEGKGLEGPLDLINYIDVAQQDGKLPFVPPEEEFIMGVSKYGIKVSTSDQYEQAQAICKVLSTAFDSVLTSEKP

SEQ ID NO: 18158 - protein, 104 aa, Artificial Sequence
  Synthetic polypeptide
ELRSRLSLGPELGRIRPYSGDPGQVTDSSGALASSFERGCYPAALLVGQSNNNSDTCAEFRIKYVGAIEKLKLSEGKGLEGPLDLINYIDVAQVKKKNSVTLWL

SEQ ID NO: 18159 - protein, 15 aa, Artificial Sequence
  Synthetic polypeptide
KGLLSCSLAGRTKQQ

SEQ ID NO: 18160 - protein, 42 aa, Artificial Sequence
  Synthetic polypeptide
APSLAASVLTLVTLGRSLTLRALWHPRLKGAVILQPCWTKQQ

SEQ ID NO: 18161 - protein, 60 aa, Artificial Sequence
  Synthetic polypeptide
ELRSRLSLGPELGRIRPYSGDPGQVTDSSGALASSFERGCYPAALLDKATIIQIPVQNFE

SEQ ID NO: 18162 - protein, 24 aa, Artificial Sequence
  Synthetic polypeptide
KGLLSCSLAGQSNNNSDTCAEFRI

SEQ ID NO: 18163 - protein, 43 aa, Artificial Sequence
  Synthetic polypeptide
KGLLSCSLAGQSNNNSDTCAEFRIKYVGAIEKLKLSEGKGLEG

SEQ ID NO: 18164 - protein, 45 aa, Artificial Sequence
  Synthetic polypeptide
KGLLSCSLAGQSNNNSDTCAEFRIKYVGAIEKLKLSEGKGLEGPL

SEQ ID NO: 18165 - protein, 55 aa, Artificial Sequence
  Synthetic polypeptide
KGLLSCSLAGQSNNNSDTCAEFRIKYVGAIEKLKLSEGKGLEGPLDLINYIDVAQ

SEQ ID NO: 18166 - protein, 73 aa, Artificial Sequence
  Synthetic polypeptide
KGLLSCSLAGQSNNNSDTCAEFRIKYVGAIEKLKLSEGKGLEGPLDLINYIDVAQQDGKLPFVPPEEEFIMGV

SEQ ID NO: 18167 - protein, 95 aa, Artificial Sequence
  Synthetic polypeptide
KGLLSCSLAGQSNNNSDTCAEFRIKYVGAIEKLKLSEGKGLEGPLDLINYIDVAQQDGKLPFVPPEEEFIMGVSKYGIKVSTSDQYDVLHRHALY

SEQ ID NO: 18168 - protein, 159 aa, Artificial Sequence
  Synthetic polypeptide
KGLLSCSLAGQSNNNSDTCAEFRIKYVGAIEKLKLSEGKGLEGPLDLINYIDVAQQDGKLPFVPPEEEFIMGVSKYGIKVSTSDQYDVLHRHALYLIIRMVCYDDGLGAGKSLLALKTTDASNEEYSLWVYQCNSLEQAQAICKVLSTAFDSVLTSEKP

SEQ ID NO: 18169 - protein, 143 aa, Artificial Sequence
  Synthetic polypeptide
KGLLSCSLAGQSNNNSDTCAEFRIKYVGAIEKLKLSEGKGLEGPLDLINYIDVAQQDGKLPFVPPEEEFIMGVSKYGIKVSTSDQYDVLHRHALYLIIRMVCYDDGLGAGKSLLALKTTDASNEEYSLWVYQCNSLVRLRYFG

SEQ ID NO: 18170 - protein, 109 aa, Artificial Sequence
  Synthetic polypeptide
KGLLSCSLAGQSNNNSDTCAEFRIKYVGAIEKLKLSEGKGLEGPLDLINYIDVAQQDGKLPFVPPEEEFIMGVSKYGIKVSTSDQYEQAQAICKVLSTAFDSVLTSEKP

SEQ ID NO: 18171 - protein, 66 aa, Artificial Sequence
  Synthetic polypeptide
KGLLSCSLAGQSNNNSDTCAEFRIKYVGAIEKLKLSEGKGLEGPLDLINYIDVAQVKKKNSVTLWL

SEQ ID NO: 18172 - protein, 106 aa, Artificial Sequence; identical to SEQ ID NO: 3538
  Synthetic polypeptide

SEQ ID NO: 18173 - protein, 722 aa, Artificial Sequence; identical to SEQ ID NO: 1722
  Synthetic polypeptide

SEQ ID NO: 18174 - protein, 771 aa, Artificial Sequence; identical to SEQ ID NO: 1657
  Synthetic polypeptide

SEQ ID NO: 18175 - protein, 4 aa, Artificial Sequence
  Synthetic polypeptide
LWSW

SEQ ID NO: 18176 - protein, 26 aa, Artificial Sequence
  Synthetic polypeptide
WGRRRRIWGGLQNLLCDCGVGKGPTE

SEQ ID NO: 18177 - protein, 170 aa, Artificial Sequence
  Synthetic polypeptide
FYIMGSSWKKPQRAASSSRGTSSGRVPSDCCQQPATNGPWVVVVSWRSPSCSPASTMSPAARSSWRLLRSLNVPRASGLSPIRTRETSFPSSPCMGASRVWGAVEGCRWSPWRPRVSRRAGALSFMSSCMCWASGTSTRGPTGTAISVSTGTRSCQALKSTSSSLRAATC

SEQ ID NO: 18178 - protein, 52 aa, Artificial Sequence
  Synthetic polypeptide
SQENKLWAPTDSTLWAHPGRNPREQLPHRGGHHPAESLPTAVSNQQQMAHGW

SEQ ID NO: 18179 - protein, 399 aa, Artificial Sequence
  Synthetic polypeptide
SVTVSHHSQMGPSSLRKTSSGLPLILHYGLILEETPESSFLIEGDIIRPSPFRLLSATSNKWPMGGSGVVEVPFLLSSKYDEPSRQVILEALAEFERSTCIRFVTYQDQRDFISIIPMYGCFSSVGRSGGMQVVSLAPTCLQKGRGIVLHELMHVLGFWHEHTRADRDRYIRVNWNEILPGFEINFIKSQSSNMLTPYDYSSVMHYGRLAFSRRGLPTITPLWAPSVHIGQRWNLSASDITRVLKLYGCSPSGPRPRGRGSHAHSTGRSPAPASLSLQRLLEALSAESRSPDPSGSSAGGQPVPAGPGESPHGWESPALKKLSAEASARQPQTLASSPRSRPGAGAPGVAQEQSWLAGVSTKPTVPSSEAGIQPVPVQGSPALPGGCVPRNHFKGMSED

SEQ ID NO: 18180 - protein, 5 aa, Artificial Sequence
  Synthetic polypeptide
FYIMV

SEQ ID NO: 18181 - protein, 40 aa, Artificial Sequence
  Synthetic polypeptide
SQENKLWAPTDSTLWCDPRSAPGLQLRRSLWYQLPRWPHP

SEQ ID NO: 18182 - protein, 441 aa, Artificial Sequence
  Synthetic polypeptide
SVTVSHHSQMGPSSLRKTSSGLPLILHYGVILGAPLASSCAGACGTSFPDGLTPEGTQASGDKDIPAINQGLILEETPESSFLIEGDIIRPSPFRLLSATSNKWPMGGSGVVEVPFLLSSKYDEPSRQVILEALAEFERSTCIRFVTYQDQRDFISIIPMYGCFSSVGRSGGMQVVSLAPTCLQKGRGIVLHELMHVLGFWHEHTRADRDRYIRVNWNEILPGFEINFIKSQSSNMLTPYDYSSVMHYGRLAFSRRGLPTITPLWAPSVHIGQRWNLSASDITRVLKLYGCSPSGPRPRGRGSHAHSTGRSPAPASLSLQRLLEALSAESRSPDPSGSSAGGQPVPAGPGESPHGWESPALKKLSAEASARQPQTLASSPRSRPGAGAPGVAQEQSWLAGVSTKPTVPSSEAGIQPVPVQGSPALPGGCVPRNHFKGMSED

SEQ ID NO: 18183 - protein, 308 aa, Artificial Sequence
  Synthetic polypeptide
GKSHLAIVQKVNNEGEGDPFYEVLGLVTLEDVIEEIIKSEILDESDMYTDNRSRKRVSEKNKRDFSAFKDADNELKVKISPQLLLAAHRFLATEVSQFSPSLISEKILLRLLKYPDVIQELKFDEHNKYYARHYLYTRNKPADYFILILQGKVEVEAGKENMKFETGAFSYYGTMALTSVPSDRSPAHPTPLSRSASLSYPDRTDVSTAATLAGSSNQFGSSVLGQYISDFSVRALVDLQYIKITRQQYQNGLLASRMENSPQFPIDGCTTHMENLAEKSELPVVDETTTLLNERNSLLHKASHENAI

SEQ ID NO: 18184 - protein, 14 aa, Artificial Sequence
  Synthetic polypeptide
GLSEGSPTWPSCRR

SEQ ID NO: 18185 - protein, 16 aa, Artificial Sequence
  Synthetic polypeptide
VREVPPGHRAEGKQRG

SEQ ID NO: 18186 - protein, 299 aa, Artificial Sequence
  Synthetic polypeptide
GKSHLAIVQKVNNEGEGDPFYEVLGLVTLEDVIEEIIRSEILDESEDYRDTVVKRKPASLMAPLKRKEEFSLFKVSDDEYKVTISPQLLLATQRFLSREVDVFSPLRISEKVLLHLLKHPSVNQEVRFDESNRLATHHYLYQRSQPVDYFILILQGRVEVEIGKEGLKFENGAFTYYGVSALTVPSSVHQSPVSSLQPIRHDLQPDPGDGTHSSAYCPDYTVRALSDLQLIKVTRLQYLNALLATRAQNLPQSPENTDLQVIPGSQTRLLGEKTTTAAGSSHSRPGVPVEGSPGRNPGV

SEQ ID NO: 18187 - protein, 14 aa, Artificial Sequence
  Synthetic polypeptide
GLSEGSPTWPSCRR

SEQ ID NO: 18188 - protein, 16 aa, Artificial Sequence
  Synthetic polypeptide
VREVPPGHRAEGEQRG

SEQ ID NO: 18189 - protein, 134 aa, Artificial Sequence
  Synthetic polypeptide
AQEFQTSRDRSPAHPTPLSRSASLSYPDRTDVSTAATLAGSSNQFGSSVLGQYISDFSVRALVDLQYIKITRQQYQNGLLASRMENSPQFPIDGCTTHMENLAEKSELPVVDETTTLLNERNSLLHKASHENAI

SEQ ID NO: 18190 - protein, 135 aa, Artificial Sequence
  Synthetic polypeptide
AQEFQTSRDRSPAHPTPLSRSASLSYPDRTDVSTAATLAGSSNQFGSSVLGQYISDFSVRALVDLQYIKPQSWPCFSRPGDRVCLPAPPSMNSSLPHADHSAAVPERAAGFSHGEQPSVSHRRVHHPHGELGREV

SEQ ID NO: 18191 - protein, 114 aa, Artificial Sequence
  Synthetic polypeptide
GQAWWLIPVILALWEAEAGGSLEPRSFKPAETVPQHTPPHSAAQPPSVTQTAQTSQLQQPWQAAATSLAALSWASTSLTSASGHSWTCSTSRSLGSSTRTGCWLLAWRTALSFP

SEQ ID NO: 18192 - protein, 113 aa, Artificial Sequence
  Synthetic polypeptide
GQAWWLIPVILALWEAEAGGSLEPRSFKPAETVPQHTPPHSAAQPPSVTQTAQTSQLQQPWQAAATSLAALSWASTSLTSASGHSWTCSTSSLNPGPVSPGLVIGSASQPLPP

SEQ ID NO: 18193 - protein, 66 aa, Artificial Sequence
  Synthetic polypeptide
HFGRLRQEDRLSPGVSNQPRPFPSTPHPTQPLSLPQLPRPHRRLNCSNLGRQQQPVWQLCPGPVHL

SEQ ID NO: 18194 - protein, 530 aa, Artificial Sequence
  Synthetic polypeptide
GQEFKTSLTNMEADEALLHNLRLQLEAQFLQDDISAAKDRHKKNLLEVQTYISILQQIIHTTPPASIVTSGMREEKLLTEREVAALRSQLEEGREVLSHLQAQRVELQAQTTTLEQAIKSAHECYDDEIQLYNEQIETLRKEIEETERVLEKSSYDCRQLAVAQQTLKNELDRYHRIIEIEGNRLTSAFIETPIPLFTQSHGVSLSTGSGGKDLTRALQDITAAKPRQKALPKNVPRRKEIITKDKTNGALEDAPLKGLEDTKLVQVVLKEESESKFESESKEVSPLTQEGAPEDVPDGGQISKGFGKLYRKVKEKVRSPKEPETPTELYTKERHVLVTGDANYVDPRFYVSSITAKGGVAVSVAEDSVLYDGQVEPSPESPKPPLENGQVGLQEKEDGQPIDQQPIDKEIEPDGAELEGPEEKREGEERDEESRRPCAMVTPGAEEPSIPEPPKPAADQDGAEVLGTRSRSLPEKGPPKALAYKTVEVVESIEKISTESIQTYEETAVIVETMIGKTKSDKKKSGEKSS

SEQ ID NO: 18195 - protein, 59 aa, Artificial Sequence
  Synthetic polypeptide
PTWKLMKPCCITYAFSWKPNFCKMISVRQRTGTRRIFWKFRPISASCSRSSTPLLQHPL

SEQ ID NO: 18196 - protein, 26 aa, Artificial Sequence
  Synthetic polypeptide
SQHFGRPRWVDHLRSGVQDQPDQHGS

SEQ ID NO: 18197 - protein, 8 aa, Artificial Sequence
  Synthetic polypeptide
MEPSAISR

SEQ ID NO: 18198 - protein, 31 aa, Artificial Sequence
  Synthetic polypeptide
PVNHQIFEWSHQLSAGRDRDVPAWNVLSPSV

SEQ ID NO: 18199 - protein, 448 aa, Artificial Sequence
  Synthetic polypeptide
TTRYLNGAISYQQVEIVMSLLGMFCPPLFETIAALENYHPRTGLKWQLGRIFALFLGNLYTFLLALMDDVHLKLANEETIKNITHWTLFNYYNSSGWNESVPRPPLHPADVPRGSCWETAVGIEFMRLTVSDMLVTYITILLGDFLRACFVRFMNYCWCWDLEAGFPSYAEFDISGNVLGLIFNQGMIWMGSFYAPGLVGINVLRLLTSMYFQCWAVMSSNVPHERVFKASRSNNFYMGLLLLVLFLSLLPVAYTIMSLPPSFDCGPFSGKNRMYDVLQETIENDFPTFLGKIFAFLANPGLIIPAILLMFLAIYYLNSVSKSLSRANAQLRKKIQVLREVEKSHKSVKGKATARDSEDTPKSSSKNATQLQLTKEETTPPSASQSQAMDKKAQGPGTSNSASRTTLPASGHLPISRPPGIGPDSGHAPSQTHPWRSASGKSAQRPPH

SEQ ID NO: 18200 - protein, 36 aa, Artificial Sequence
  Synthetic polypeptide
QADSKIYMEEKRFKNSQDIPEEEEQGSPCMSYPGHL

SEQ ID NO: 18201 - protein, 68 aa, Artificial Sequence
  Synthetic polypeptide
RCQFSPKIYRFNAIPIKIPTGFFVELDKLILKFIWRRKDSRIAKTFLKKKNKALPACPIQATCEAASK

SEQ ID NO: 18202 - protein, 608 aa, Artificial Sequence
  Synthetic polypeptide
RCQFSPKIYRFNAIPIKIPTGFFVELDKLILKFIWRRKDSRIAKTFLKKKNKALPACPIQATCEAASKEENKEKNRYVNILPYDHSRVHLTPVEGVPDSDYINASFINGYQEKNKFIAAQGPKEETVNDFWRMIWEQNTATIVMVTNLKERKECKCAQYWPDQGCWTYGNIRVSVEDVTVLVDYTVRKFCIQQVGDMTNRKPQRLITQFHFTSWPDFGVPFTPIGMLKFLKKVKACNPQYAGAIVVHCSAGVGRTGTFVVIDAMLDMMHTERKVDVYGFVSRIRAQRCQMVQTDMQYVFIYQALLEHYLYGDTELEVTSLETHLQKIYNKIPGTSNNGLEEEFKKLTSIKIQNDKMRTGNLPANMKKNRVLQIIPYEFNRVIIPVKRGEENTDYVNASFIDGYRQKDSYIASQGPLLHTIEDFWRMIWEWKSCSIVMLTELEERGQEKCAQYWPSDGLVSYGDITVELKKEEECESYTVRDLLVTNTRENKSRQIRQFHFHGWPEVGIPSDGKGMISIIAAVQKQQQQSGNHPITVHCSAGAGRTGTFCALSTVLERVKAEGILDVFQTVKSLRLQRPHMVQTLEQYEFCYKVVQEYIDAFSDYANFK

SEQ ID NO: 18203 - protein, 21 aa, Artificial Sequence
  Synthetic polypeptide
RRRTRLSLHVLSRPPVRLLPR

SEQ ID NO: 18204 - protein, 30 aa, Artificial Sequence
  Synthetic polypeptide
RRRTRLSLHVLSRPPVRLLPRRKTRKKIDM

SEQ ID NO: 18205 - protein, 38 aa, Artificial Sequence
  Synthetic polypeptide
KEGNSNTCYNMDEPGRHHGLPRKEQIHCCTRTKRRNGE

SEQ ID NO: 18206 - protein, 532 aa, Artificial Sequence
  Synthetic polypeptide
MWYMHTVECYSAFKRKEILIHATTWMNLEDIMGYQEKNKFIAAQGPKEETVNDFWRMIWEQNTATIVMVTNLKERKECKCAQYWPDQGCWTYGNIRVSVEDVTVLVDYTVRKFCIQQVGDMTNRKPQRLITQFHFTSWPDFGVPFTPIGMLKFLKKVKACNPQYAGAIVVHCSAGVGRTGTFVVIDAMLDMMHTERKVDVYGFVSRIRAQRCQMVQTDMQYVFIYQALLEHYLYGDTELEVTSLETHLQKIYNKIPGTSNNGLEEEFKKLTSIKIQNDKMRTGNLPANMKKNRVLQIIPYEFNRVIIPVKRGEENTDYVNASFIDGYRQKDSYIASQGPLLHTIEDFWRMIWEWKSCSIVMLTELEERGQEKCAQYWPSDGLVSYGDITVELKKEEECESYTVRDLLVTNTRENKSRQIRQFHFHGWPEVGIPSDGKGMISIIAAVQKQQQQSGNHPITVHCSAGAGRTGTFCALSTVLERVKAEGILDVFQTVKSLRLQRPHMVQTLEQYEFCYKVVQEYIDAFSDYANFK

SEQ ID NO: 18207 - protein, 24 aa, Artificial Sequence
  Synthetic polypeptide
TWKTSWATKKRTNSLLHKDQKKKR

SEQ ID NO: 18208 - protein, 13 aa, Artificial Sequence
  Synthetic polypeptide
EHDFWHHSEPAPS

SEQ ID NO: 18209 - protein, 263 aa, Artificial Sequence
  Synthetic polypeptide
LLASFRASPFMNKFFPASFPNRQYQLLFTQGSGENKEEIINYEFDTKDLVCLGLSSIVGVWYLLRKHWIANNLFGLAFSLNGVELLHLNNVSTGCILLGGLFIYDVFWVFGTNVMVTVAKSFEAPIKLVFPQDLLEKGLEANNFAMLGLGDVVIPGIFIALLLRFDISLKKNTHTYFYTSFAAYIFGLGLTIFIMHIFKHAQPALLYLVPACIGFPVLVALAKGEVTEMFSYEESNPKDPAAVTESKEGTEASASKGLEKKEK

SEQ ID NO: 18210 - protein, 312 aa, Artificial Sequence
  Synthetic polypeptide
LLASFRASPFMNKFFPASFPNRQYQLLFTQGSGENKEEIINYEFDTKDLVCLGLSSIVGVWYLLRKHWIANNLFGLAFSLNGVELLHLNNVSTGCILLGGLFIYDVFWVFGTNVMVTVAKSFEAPIKLVFPQDLLEKGLEANNFAMLGLGDVVIPGIFIALLLRFDISLKKNTHTYFYTSFAAYIFGLGLTIFIMHIFKHAQPALLYLVPACIGFPVLVALAKGEVTEMFSYESSAEILPHTPRLTHFPTVSGSPASLADSMQQKLAGPRRRRPQNPSAIYEESNPKDPAAVTESKEGTEASASKGLEKKEK

SEQ ID NO: 18211 - protein, 280 aa, Artificial Sequence
  Synthetic polypeptide
LLASFRASPFMNKFFPASFPNRQYQLLFTQGSGENKEEIINYEFDTKDLVCLGLSSIVGVWYLLRKHWIANNLFGLAFSLNGVELLHLNNVSTGCILLGGLFIYDVFWVFGTNVMVTVAKSFEAPIKLVFPQDLLEKGLEANNFAMLGLGDVVIPGIFIALLLRFDISLKKNTHTYFYTSFAAYIFGLGLTIFIMHIFKHAQPALLYLVPACIGFPVLVALAKGEVTEMFSYESSAEILPHTPRLTHFPTVSGSPASLADSMQQKLAGPRRRRPQNPSAM

SEQ ID NO: 18212 - protein, 158 aa, Artificial Sequence
  Synthetic polypeptide
LLASFRASPFMNKFFPASFPNRQYQLLFTQGSGENKEEIINYEFDTKDLVCLGLSSIVGVWYLLRKVFGTNVMVTVAKSFEAPIKLVFPQDLLEKGLEANNFAMLGLGDVVIPGIFIALLLRFDISLKKNTHTYFYTSFAAYIFGLGLTIFIMHIFKH

SEQ ID NO: 18213 - protein, 221 aa, Artificial Sequence
  Synthetic polypeptide
LLASFRASPFMNKFFPASFPNRQYQLLFTQGSGENKEEIINYEFDTKDLVCLGLSSIVGVWYLLRKVFGTNVMVTVAKSFEAPIKLVFPQDLLEKGLEANNFAMLGLGDVVIPGIFIALLLRFDISLKKNTHTYFYTSFAAYIFGLGLTIFIMHIFKHAQPALLYLVPACIGFPVLVALAKGEVTEMFSYEESNPKDPAAVTESKEGTEASASKGLEKKEK

SEQ ID NO: 18214 - protein, 22 aa, Artificial Sequence
  Synthetic polypeptide
NQYRVLDENMTFGIIQSQPLHE

SEQ ID NO: 18215 - protein, 236 aa, Artificial Sequence
  Synthetic polypeptide
EHDFWHHSEPEIINYEFDTKDLVCLGLSSIVGVWYLLRKHWIANNLFGLAFSLNGVELLHLNNVSTGCILLGGLFIYDVFWVFGTNVMVTVAKSFEAPIKLVFPQDLLEKGLEANNFAMLGLGDVVIPGIFIALLLRFDISLKKNTHTYFYTSFAAYIFGLGLTIFIMHIFKHAQPALLYLVPACIGFPVLVALAKGEVTEMFSYEESNPKDPAAVTESKEGTEASASKGLEKKEK

SEQ ID NO: 18216 - protein, 285 aa, Artificial Sequence
  Synthetic polypeptide
EHDFWHHSEPEIINYEFDTKDLVCLGLSSIVGVWYLLRKHWIANNLFGLAFSLNGVELLHLNNVSTGCILLGGLFIYDVFWVFGTNVMVTVAKSFEAPIKLVFPQDLLEKGLEANNFAMLGLGDVVIPGIFIALLLRFDISLKKNTHTYFYTSFAAYIFGLGLTIFIMHIFKHAQPALLYLVPACIGFPVLVALAKGEVTEMFSYESSAEILPHTPRLTHFPTVSGSPASLADSMQQKLAGPRRRRPQNPSAIYEESNPKDPAAVTESKEGTEASASKGLEKKEK

SEQ ID NO: 18217 - protein, 253 aa, Artificial Sequence
  Synthetic polypeptide
EHDFWHHSEPEIINYEFDTKDLVCLGLSSIVGVWYLLRKHWIANNLFGLAFSLNGVELLHLNNVSTGCILLGGLFIYDVFWVFGTNVMVTVAKSFEAPIKLVFPQDLLEKGLEANNFAMLGLGDVVIPGIFIALLLRFDISLKKNTHTYFYTSFAAYIFGLGLTIFIMHIFKHAQPALLYLVPACIGFPVLVALAKGEVTEMFSYESSAEILPHTPRLTHFPTVSGSPASLADSMQQKLAGPRRRRPQNPSAM

SEQ ID NO: 18218 - protein, 131 aa, Artificial Sequence
  Synthetic polypeptide
EHDFWHHSEPEIINYEFDTKDLVCLGLSSIVGVWYLLRKVFGTNVMVTVAKSFEAPIKLVFPQDLLEKGLEANNFAMLGLGDVVIPGIFIALLLRFDISLKKNTHTYFYTSFAAYIFGLGLTIFIMHIFKH

SEQ ID NO: 18219 - protein, 194 aa, Artificial Sequence
  Synthetic polypeptide
EHDFWHHSEPEIINYEFDTKDLVCLGLSSIVGVWYLLRKVFGTNVMVTVAKSFEAPIKLVFPQDLLEKGLEANNFAMLGLGDVVIPGIFIALLLRFDISLKKNTHTYFYTSFAAYIFGLGLTIFIMHIFKHAQPALLYLVPACIGFPVLVALAKGEVTEMFSYEESNPKDPAAVTESKEGTEASASKGLEKKEK

SEQ ID NO: 18220 - protein, 12 aa, Artificial Sequence
  Synthetic polypeptide
LLASFRARDHQL

SEQ ID NO: 18221 - protein, 34 aa, Artificial Sequence
  Synthetic polypeptide
NQYRVLDENMTFGIIQSQRSSIMNLTPRTWCAWA

SEQ ID NO: 18222 - protein, 67 aa, Artificial Sequence; identical to SEQ ID NO: 4335
  Synthetic polypeptide

SEQ ID NO: 18223 - protein, 13 aa, Artificial Sequence
  Synthetic polypeptide
LLASFRARYLAPM

SEQ ID NO: 18224 - protein, 110 aa, Artificial Sequence; identical to SEQ ID NO: 3498
  Synthetic polypeptide

SEQ ID NO: 18225 - protein, 173 aa, Artificial Sequence; identical to SEQ ID NO: 3004
  Synthetic polypeptide

SEQ ID NO: 18226 - protein, 222 aa, Artificial Sequence; identical to SEQ ID NO: 2794
  Synthetic polypeptide

SEQ ID NO: 18227 - protein, 190 aa, Artificial Sequence; identical to SEQ ID NO: 2905
  Synthetic polypeptide

SEQ ID NO: 18228 - protein, 29 aa, Artificial Sequence
  Synthetic polypeptide
LSSCQIQRRSVPSTGHLMDWCPMEILQWN

SEQ ID NO: 18229 - protein, 175 aa, Artificial Sequence
  Synthetic polypeptide
SRSPVTVLLPNPKEKCAQYWPSDGLVSYGDITVELKKEEECESYTVRDLLVTNTRENKSRQIRQFHFHGWPEVGIPSDGKGMISIIAAVQKQQQQSGNHPITVHCSAGAGRTGTFCALSTVLERVKAEGILDVFQTVKSLRLQRPHMVQTLEQYEFCYKVVQEYIDAFSDYANFK

SEQ ID NO: 18230 - protein, 45 aa, Artificial Sequence
  Synthetic polypeptide
WLSPCKFSVRSVPSRLGPTGTALVKITSDCPLAKSKGEVCPVLAI

SEQ ID NO: 18231 - protein, 40 aa, Artificial Sequence
  Synthetic polypeptide
CFSKHDPTLEEEYPHLLLHQLCSLHLRPGPYHLHHAHLQA

SEQ ID NO: 18232 - protein, 72 aa, Artificial Sequence
  Synthetic polypeptide
CFSKHDPTLEEEYPHLLLHQLCSLHLRPGPYHLHHAHLQACSACPPIPGPRLHRFSCPGGAGQGRSDRDVQL

SEQ ID NO: 18233 - protein, 121 aa, Artificial Sequence
  Synthetic polypeptide
CFSKHDPTLEEEYPHLLLHQLCSLHLRPGPYHLHHAHLQACSACPPIPGPRLHRFSCPGGAGQGRSDRDVQLRVLGGNPASYPEAHPLPHSLGLPSQPGRLHAAEASWPSPPAPAESQRHL

SEQ ID NO: 18234 - protein, 121 aa, Artificial Sequence
  Synthetic polypeptide
CFSKHDPTLEEEYPHLLLHQLCSLHLRPGPYHLHHAHLQACSACPPIPGPRLHRFSCPGGAGQGRSDRDVQLRVLGGNPASYPEAHPLPHSLGLPSQPGRLHAAEASWPSPPAPAESQRHV

SEQ ID NO: 18235 - protein, 3 aa, Artificial Sequence
  Synthetic polypeptide
SNA

SEQ ID NO: 18236 - protein, 40 aa, Artificial Sequence
  Synthetic polypeptide
VSQSMIQRLKKNTHTYFYTSFAAYIFGLGLTIFIMHIFKH

SEQ ID NO: 18237 - protein, 103 aa, Artificial Sequence
  Synthetic polypeptide
VSQSMIQRLKKNTHTYFYTSFAAYIFGLGLTIFIMHIFKHAQPALLYLVPACIGFPVLVALAKGEVTEMFSYEESNPKDPAAVTESKEGTEASASKGLEKKEK

SEQ ID NO: 18238 - protein, 152 aa, Artificial Sequence
  Synthetic polypeptide
VSQSMIQRLKKNTHTYFYTSFAAYIFGLGLTIFIMHIFKHAQPALLYLVPACIGFPVLVALAKGEVTEMFSYESSAEILPHTPRLTHFPTVSGSPASLADSMQQKLAGPRRRRPQNPSAIYEESNPKDPAAVTESKEGTEASASKGLEKKEK

SEQ ID NO: 18239 - protein, 120 aa, Artificial Sequence
  Synthetic polypeptide
VSQSMIQRLKKNTHTYFYTSFAAYIFGLGLTIFIMHIFKHAQPALLYLVPACIGFPVLVALAKGEVTEMFSYESSAEILPHTPRLTHFPTVSGSPASLADSMQQKLAGPRRRRPQNPSAM

SEQ ID NO: 18240 - protein, 33 aa, Artificial Sequence; identical to SEQ ID NO: 6296
  Synthetic polypeptide

SEQ ID NO: 18241 - protein, 73 aa, Artificial Sequence; identical to SEQ ID NO: 4127
  Synthetic polypeptide

SEQ ID NO: 18242 - protein, 122 aa, Artificial Sequence; identical to SEQ ID NO: 3354
  Synthetic polypeptide

SEQ ID NO: 18243 - protein, 90 aa, Artificial Sequence; identical to SEQ ID NO: 3768
  Synthetic polypeptide

SEQ ID NO: 18244 - protein, 32 aa, Artificial Sequence
  Synthetic polypeptide
NAACPPIPGPRLHRFSCPGGAGQGRSDRDVQL

SEQ ID NO: 18245 - protein, 81 aa, Artificial Sequence
  Synthetic polypeptide
NAACPPIPGPRLHRFSCPGGAGQGRSDRDVQLRVLGGNPASYPEAHPLPHSLGLPSQPGRLHAAEASWPSPPAPAESQRHL

SEQ ID NO: 18246 - protein, 81 aa, Artificial Sequence
  Synthetic polypeptide
NAACPPIPGPRLHRFSCPGGAGQGRSDRDVQLRVLGGNPASYPEAHPLPHSLGLPSQPGRLHAAEASWPSPPAPAESQRHV

SEQ ID NO: 18247 - protein, 43 aa, Artificial Sequence
  Synthetic polypeptide
DQTRKLLFEPGDLACPPIPGPRLHRFSCPGGAGQGRSDRDVQL

SEQ ID NO: 18248 - protein, 92 aa, Artificial Sequence
  Synthetic polypeptide
DQTRKLLFEPGDLACPPIPGPRLHRFSCPGGAGQGRSDRDVQLRVLGGNPASYPEAHPLPHSLGLPSQPGRLHAAEASWPSPPAPAESQRHL

SEQ ID NO: 18249 - protein, 92 aa, Artificial Sequence
  Synthetic polypeptide
DQTRKLLFEPGDLACPPIPGPRLHRFSCPGGAGQGRSDRDVQLRVLGGNPASYPEAHPLPHSLGLPSQPGRLHAAEASWPSPPAPAESQRHV

SEQ ID NO: 18250 - protein, 25 aa, Artificial Sequence
  Synthetic polypeptide
PSLPSYTWSPPASVFLSWWRWPREK

SEQ ID NO: 18251 - protein, 42 aa, Artificial Sequence
  Synthetic polypeptide
EPWVQAQPLTCYACPPIPGPRLHRFSCPGGAGQGRSDRDVQL

SEQ ID NO: 18252 - protein, 91 aa, Artificial Sequence
  Synthetic polypeptide
EPWVQAQPLTCYACPPIPGPRLHRFSCPGGAGQGRSDRDVQLRVLGGNPASYPEAHPLPHSLGLPSQPGRLHAAEASWPSPPAPAESQRHL

SEQ ID NO: 18253 - protein, 91 aa, Artificial Sequence
  Synthetic polypeptide
EPWVQAQPLTCYACPPIPGPRLHRFSCPGGAGQGRSDRDVQLRVLGGNPASYPEAHPLPHSLGLPSQPGRLHAAEASWPSPPAPAESQRHV

SEQ ID NO: 18254 - protein, 45 aa, Artificial Sequence
  Synthetic polypeptide
GGATLVWELGALGSGPATDLLCLPSYTWSPPASVFLSWWRWPREK

SEQ ID NO: 18255 - protein, 64 aa, Artificial Sequence
  Synthetic polypeptide
LAMPALLYLVPACIGFPVLVALAKGEVTEMFSYEESNPKDPAAVTESKEGTEASASKGLEKKEK

SEQ ID NO: 18256 - protein, 113 aa, Artificial Sequence
  Synthetic polypeptide
LAMPALLYLVPACIGFPVLVALAKGEVTEMFSYESSAEILPHTPRLTHFPTVSGSPASLADSMQQKLAGPRRRRPQNPSAIYEESNPKDPAAVTESKEGTEASASKGLEKKEK

SEQ ID NO: 18257 - protein, 81 aa, Artificial Sequence
  Synthetic polypeptide
LAMPALLYLVPACIGFPVLVALAKGEVTEMFSYESSAEILPHTPRLTHFPTVSGSPASLADSMQQKLAGPRRRRPQNPSAM

SEQ ID NO: 18258 - protein, 347 aa, Artificial Sequence
  Synthetic polypeptide
AQHTLDLVKYMKDVSPYFKNSTGGTSVGWDSPPASPLQRQPSSPGPTPRNFSEAKHMSLKMAYVSKRCTPNDPEPRYLEICSADGQDTLFLRAKDEASARSWATAIQAQVNTLTPRVKDELQALLAATSTAGSQDIKQIGWLTEQLPSGGTAPTLALLTEKELLLYLSLPETREALSRPARTAPLIATRLVHSGPSKGSVPYDAELSFALRTGTRHGVDTHLFSVESPQELAAWTRQLVDGCHRAAEGVQEVSTACTWNGRPCSLSVHIDKGFTLWAAEPGAARAVLLRQPFEKLQMSSDDGASLLFLDFGGAEGEIQLDLHSCPKTIVFIIHSFLSAKVTRLGLLA

SEQ ID NO: 18259 - protein, 5 aa, Artificial Sequence
  Synthetic polypeptide
ILSSI

SEQ ID NO: 18260 - protein, 81 aa, Artificial Sequence
  Synthetic polypeptide
LVSQPPGLALSPTYIRSCQVYEGRLTVFQELYWWDLGRLGLTSCLTPSAAAFLPWPHTPELQRGQTHVLEDGICLEEVHPQ

SEQ ID NO: 18261 - protein, 37 aa, Artificial Sequence; identical to SEQ ID NO: 5994
  Synthetic polypeptide

SEQ ID NO: 18262 - protein, 872 aa, Artificial Sequence; identical to SEQ ID NO: 1598
  Synthetic polypeptide

SEQ ID NO: 18263 - protein, 88 aa, Artificial Sequence; identical to SEQ ID NO: 3791
  Synthetic polypeptide

SEQ ID NO: 18264 - protein, 710 aa, Artificial Sequence
  Synthetic polypeptide
DQHGQHGASQNDDGSRSKDETRVSTNGSDDPEDAGAGENRRVSGNNSPSLSNGGFKPSRPPRPSRPPPPTPRRPASVNGSPSATSESDGSSTGSLPPTNTNTNTSEGATSGLIIPLTISGGSGPRPLNPVTQAPLPPGWEQRVDQHGRVYYVDHVEKRTTWDRPEPLPPGWERRVDNMGRIYYVDHFTRTTTWQRPTLESVRNYEQWQLQRSQLQGAMQQFNQRFIYGNQDLFATSQSKEFDPLGPLPPGWEKRTDSNGRVYFVNHNTRITQWEDPRSQGQLNEKPLPEGWEMRFTVDGIPYFVDHNRRTTTYIDPRTGKSALDNGPQIAYVRDFKAKVQYFRFWCQQLAMPQHIKITVTRKTLFEDSFQQIMSFSPQDLRRRLWVIFPGEEGLDYGGVAREWFFLLSHEVLNPMYCLFEYAGKDNYCLQINPASYINPDHLKYFRFIGRFIAMALFHGKFIDTGFSLPFYKRILNKPVGLKDLESIDPEFYNSLIWVKENNIEECDLEMYFSVDKEILGEIKSHDLKPNGGNILVTEENKEEYIRMVAEWRLSRGVEEQTQAFFEGFNEILPQQYLQYFDAKELEVLLCGMQEIDLNDWQRHAIYRHYARTSKQIMWFWQFVKEIDNEKRMRLLQFVTGTCRLPVGGFADLMGSNGPQKFCIEKVGKENWLPRSHTCFNRLDLPPYKSYEQLKEKLLFAIEETEGFGQE

SEQ ID NO: 18265 - protein, 37 aa, Artificial Sequence
  Synthetic polypeptide
QAWWLTPVIPALWEAKAGGSLESGSLRPAWTTWCFSE

SEQ ID NO: 18266 - protein, 27 aa, Artificial Sequence
  Synthetic polypeptide
VREFETSMDNMVLLRMMMAPDPRMKQE

SEQ ID NO: 18267 - protein, 483 aa, Artificial Sequence
  Synthetic polypeptide
FNSYNILKMTKLEMENILVLVRKQEKRTDSNGRVYFVNHNTRITQWEDPRSQGQLNEKPLPEGWEMRFTVDGIPYFVDHNRRTTTYIDPRTGKSALDNGPQIAYVRDFKAKVQYFRFWCQQLAMPQHIKITVTRKTLFEDSFQQIMSFSPQDLRRRLWVIFPGEEGLDYGGVAREWFFLLSHEVLNPMYCLFEYAGKDNYCLQINPASYINPDHLKYFRFIGRFIAMALFHGKFIDTGFSLPFYKRILNKPVGLKDLESIDPEFYNSLIWVKENNIEECDLEMYFSVDKEILGEIKSHDLKPNGGNILVTEENKEEYIRMVAEWRLSRGVEEQTQAFFEGFNEILPQQYLQYFDAKELEVLLCGMQEIDLNDWQRHAIYRHYARTSKQIMWFWQFVKEIDNEKRMRLLQFVTGTCRLPVGGFADLMGSNGPQKFCIEKVGKENWLPRSHTCFNRLDLPPYKSYEQLKEKLLFAIEETEGFGQE

SEQ ID NO: 18268 - protein, 51 aa, Artificial Sequence
  Synthetic polypeptide
HSQNDKTRDGEHISTCQETGEENRQQWQSIFRQPQHTNYTMGRPQKSRSIK

SEQ ID NO: 18269 - protein, 36 aa, Artificial Sequence
  Synthetic polypeptide
YLSGNRRREQTAMAEYISSTTTHELHNGKTPEVKVN

SEQ ID NO: 18270 - protein, 44 aa, Artificial Sequence
  Synthetic polypeptide
AWHPGHCGCLPPSPAPSSPLWPYQLCTHHQPCGQVCSPGCTSGD

SEQ ID NO: 18271 - protein, 55 aa, Artificial Sequence
  Synthetic polypeptide
AWHPGHCGCLPPSPAPSSPLWPYQLCTHHQPCGQVCSPGCTSGDCLAILHAVAAD

SEQ ID NO: 18272 - protein, 62 aa, Artificial Sequence
  Synthetic polypeptide
AWHPGHCGCLPPSPAPSSPLWPYQLCTHHQPCGQVCSPGCTSGDCLGHEWACPQQYFMLLLL

SEQ ID NO: 18273 - protein, 54 aa, Artificial Sequence
  Synthetic polypeptide
AWHPGHCGCLPPSPAPSSPLWPYQLCTHHQPCGQVCSPGCTSGDCLVLHAVAAD

SEQ ID NO: 18274 - protein, 80 aa, Artificial Sequence
  Synthetic polypeptide
CHMTWGRLLNLCVLWFHKTKHRKLSTQGEDTSKAVSLASRALWMPTAKPCPKFASMALPTLHPSSTMWPGLQPRLHIRGL

SEQ ID NO: 18275 - protein, 89 aa, Artificial Sequence
  Synthetic polypeptide
CHMTWGRLLNLCVLWFHKTKHRKLSTQGEDTSKAVSLASRALWMPTAKPCPKFASMALPTLHPSSTMWPGLQPRLHIRGLPRNTSCCCC

SEQ ID NO: 18276 - protein, 83 aa, Artificial Sequence
  Synthetic polypeptide
CHMTWGRLLNLCVLWFHKTKHRKLSTQGEDTSKAVSLASRALWMPTAKPCPKFASMALPTLHPSSTMWPGLQPRLHIRGLPRT

SEQ ID NO: 18277 - protein, 88 aa, Artificial Sequence
  Synthetic polypeptide
CHMTWGRLLNLCVLWFHKTKHRKLSTQGEDTSKAVSLASRALWMPTAKPCPKFASMALPTLHPSSTMWPGLQPRLHIRGLPRTSCCCC

SEQ ID NO: 18278 - protein, 47 aa, Artificial Sequence
  Synthetic polypeptide
SSKPGIQGIVDAYRQALPQVRLYGPTNFAPIINHVARFAAQAAHQGT

SEQ ID NO: 18279 - protein, 64 aa, Artificial Sequence
  Synthetic polypeptide
SSKPGIQGIVDAYRQALPQVRLYGPTNFAPIINHVARFAAQAAHQGTASDMNGLVPSNTSCCCC

SEQ ID NO: 18280 - protein, 118 aa, Artificial Sequence
  Synthetic polypeptide
SSKPGIQGIVDAYRQALPQVRLYGPTNFAPIINHVARFAAQAAHQGTASQYFMLLLLTDGAVTDVEATREAVAPREALAQTVLAEVPTQLVSYFRAQGWAPLKPLPPSAKDPAQAPQA

SEQ ID NO: 18281 - protein, 174 aa, Artificial Sequence
  Synthetic polypeptide
SSKPGIQGIVDAYRQALPQVRLYGPTNFAPIINHVARFAAQAAHQGTASQYFMLLLLTDGAVTDVEATREAVVRASNLPMSVIIVGVGGADFEAMEQLDADGGPLHTRSGQAAARDIVQFVPYRRFQNAPREALAQTVLAEVPTQLVSYFRAQGWAPLKPLPPSAKDPAQAPQA

SEQ ID NO: 18282 - protein, 206 aa, Artificial Sequence
  Synthetic polypeptide
SSKPGIQGIVDAYRQALPQVRLYGPTNFAPIINHVARFAAQAAHQGTASQYFMLLLLTDGAVTDVEATREAVVRASNLPMSVIIVGVGGADFEAMEQLDADGGPLHTRSGQAAARDIVQFVPYRRFQNVSPSGGIGTDRARRSAHTTGLILQGPGLGPAQATSTLSQGSCTGPPGLGSLGGCGKSSILCPRGPSGPQPNPSHSPQC

SEQ ID NO: 18283 - protein, 170 aa, Artificial Sequence
  Synthetic polypeptide
SSKPGIQGIVDAYRQALPQVRLYGPTNFAPIINHVARFAAQAAHQGTASYFMLLLLTDGAVTDVEATREAVVRASNLPMSVIIVGVGGADFEAMEQLDADGGPLHTRSGQAAARDIVQFVPYRRFQNAPREALAQTVLAEVPTQLVSYFRAQGWAPLKPLPPSAKDPAQA

SEQ ID NO: 18284 - protein, 20 aa, Artificial Sequence
  Synthetic polypeptide
AQEFETSLGNRHHVCVRWFQ

SEQ ID NO: 18285 - protein, 38 aa, Artificial Sequence
  Synthetic polypeptide
PGQQTPCMCSVVSIVSSSATSWYSPRNSVMRIGVKPLV

SEQ ID NO: 18286 - protein, 838 aa, Artificial Sequence
  Synthetic polypeptide
WMWWCVPVVPATQEAEARGSLEPRSLRLAWATDTMYVFGGFNSLLLSDILVFTSEQCDAHRSEAACLAAGPGIRCVWNTGSSQCISWALATDEQEEKLKSECFSKRTLDHDRCDQHTDCYSCTANTNDCHWCNDHCVPRNHSCSEGQISIFRYENCPKDNPMYYCNKKTSCRSCALDQNCQWEPRNQECIALPENICGIGWHLVGNSCLKITTAKENYDNAKLFCRNHNALLASLTTQKKVEFVLKQLRIMQSSQSMSKLTLTPWVGLRKINVSYWCWEDMSPFTNSLLQWMPSEPSDAGFCGILSEPSTRGLKAATCINPLNGSVCERPANHSAKQCRTPCALRTACGDCTSGSSECMWCSNMKQCVDSNAYVASFPFGQCMEWYTMSTCPPENCSGYCTCSHCLEQPGCGWCTDPSNTGKGKCIEGSYKGPVKMPSQAPTGNFYPQPLLNSSMCLEDSRYNWSFIHCPACQCNGHSKCINQSICEKCENLTTGKHCETCISGFYGDPTNGGKCQPCKCNGHASLCNTNTGKCFCTTKGVKGDECQLCEVENRYQGNPLRGTCYYTLLIDYQFTFSLSQEDDRYYTAINFVATPDEQNRDLDMFINASKNFNLNITWAASFSAGTQAGEEMPVVSKTNIKEYKDSFSNEKFDFRNHPNITFFVYVSNFTWPIKIQIAFSQHSNFMDLVQFFVTFFSCFLSLLLVAAVVWKIKQSCWASRRREQLLREMQQMASRPFASVNVALETDEEPPDLIGGSIKTVPKPIALEPCFGNKAAVLSVFVRLPRGLGGIPPPGQSGLAVASALVDISQQMPIVYKEKSGAVRNRKQQPPAQPGTCI

SEQ ID NO: 18287 - protein, 681 aa, Artificial Sequence
  Synthetic polypeptide
WMWWCVPVVPATQEAEARGSLEPRSLRLAWATDTMYVFGGFNSLLLSDILVFTSEQCDAHRSEAACLAAGPGIRCVWNTGSSQCISWALATDEQEEKLKSECFSKRTLDHDRCDQHTDCYSCTANTNDCHWCNDHCVPRNHSCSEGQISIFRYENCPKDNPMYYCNKKTSCRSCALDQNCQWEPRNQECIALPENICGIGWHLVGNSCLKITTAKENYDNAKLFCRNHNALLASLTTQKKVEFVLKQLRIMQSSQSMSKLTLTPWVGLRKINVSYWCWEDMSPFTNSLLQWMPSEPSDAGFCGILSEPSTRGLKAATCINPLNGSVCERPANHSAKQCRTPCALRTACGDCTSGSSECMWCSNMKQCVDSNAYVASFPFGQCMEWYTMSTCPPENCSGYCTCSHCLEQPGCGWCTDPSNTGKGKCIEGSYKGPVKMPSQAPTGNFYPQPLLNSSMCLEDSRYNWSFIHCPACQCNGHSKCINQSICEKCENLTTGKHCETCISGFYGDPTNGGKCQPCKCNGHASLCNTNTGKCFCTTKGVKGDECQLCEVENRYQGNPLRGTCYYTLLIDYQFTFSLSQEDDRYYTAINFVATPDEQNRDLDMFINASKNFNLNITWAASFSAGTQAGEEMPVVSKTNIKEYKDSFSNEKFDFRNHPNITFFVYVSNFTWPIKIQVQTEQ

SEQ ID NO: 18288 - protein, 623 aa, Artificial Sequence
  Synthetic polypeptide
MEPQFPHPHCITINPCLPGSELVLERCDLELETNGRDHHTADLCREKLVVRRGQPFWLTLHFEGRNYEASVDSLTFSVVTADAVYLDSEEERQEYVLTQQGFIYQGSAKFIKNIPWNFGQFEDGILDICLILLDVNPKFLKNAGRDCSRRSSPVYVGRVVSGMVNCNDDQGVLLGRWDNNYGDGVSPMSWIGSVDILRRWKNHGCQRVKYGQCWVFAAVACTVLRCLGIPTRVVTNYNSAHDQNSNLLIEYFRNEFGEIQGDKSEMIWNFHCWVESWMTRPDLQPGYEGWQALDPTPQEKSEGTYCCGPVPVRAIKEGDLSTKYDAPFVFAEVNADVVDWIQQDDGSVHKSINRSLIVGLKISTKSVGRDEREDITHTYKYPEGSSEEREAFTRANHLNKLAEKEETGMAMRIRVGQSMNMGSDFDVFAHITNNTAEEYVCRLLLCARTVSYNGILGPECGTKYLLNLNLEPFSEKSVPLCILYEKYRDCLTESNLIKVRALLVEPVINSYLLAERDLYLENPEIKIRILGEPKQKRKLVAEVSLQNPLPVALEGCTFTVEGAGLTEEQKTVEIPDPVEAGEEVKVRMDLLPLHMGLHKLVVNFESDKLKAVKGFRNVIIGPA

SEQ ID NO: 18289 - protein, 176 aa, Artificial Sequence
  Synthetic polypeptide
MEPQFPHPHCITINPCLPGSELVLERCDLELETNGRDHHTADLCREKLVVRRGQPFWLTLHFEGRNYEASVDSLTFSVVTGPAPSQEAGTKARFPLRDAVEEGDWTATVVDQQDCTLSLQLTTPANAPIGLYRLSLEASTGYQGSSFVLGHFILLFNAWCPADAVYLDSEEERQEY

SEQ ID NO: 18290 - protein, 297 aa, Artificial Sequence
  Synthetic polypeptide
MEPQFPHPHCITINPCLPGSELVLERCDLELETNGRDHHTADLCREKLVVRRGQPFWLTLHFEGRNYEASVDSLTFSVVTGPAPSQEAGTKARFPLRDAVEEGDWTATVVDQQDCTLSLQLTTPANAPIGLYRLSLEASTGYQGSSFVLGHFILLFNAWCPADAVYLDSEEERQEYVLTQQGFIYQGSAKFIKNIPWNFGQFEDGILDICLILLDVNPKFLKNAGRDCSRRSSPVYVGRVVSGMVNCNDDQGVLLGRWDNNYGDGVSPMSWIGSVDILRRWKNHGCQRVKYGQCWVF

SEQ ID NO: 18291 - protein, 704 aa, Artificial Sequence
  Synthetic polypeptide
MEPQFPHPHCITINPCLPGSELVLERCDLELETNGRDHHTADLCREKLVVRRGQPFWLTLHFEGRNYEASVDSLTFSVVTGPAPSQEAGTKARFPLRDAVEEGDWTATVVDQQDCTLSLQLTTPANAPIGLYRLSLEASTGYQGSSFVLGHFILLFNAWCPADAVYLDSEEERQEYVLTQQGFIYQGSAKFIKNIPWNFGQFEDGILDICLILLDVNPKFLKNAGRDCSRRSSPVYVGRVVSGMVNCNDDQGVLLGRWDNNYGDGVSPMSWIGSVDILRRWKNHGCQRVKYGQCWVFAAVACTVLRCLGIPTRVVTNYNSAHDQNSNLLIEYFRNEFGEIQGDKSEMIWNFHCWVESWMTRPDLQPGYEGWQALDPTPQEKSEGTYCCGPVPVRAIKEGDLSTKYDAPFVFAEVNADVVDWIQQDDGSVHKSINRSLIVGLKISTKSVGRDEREDITHTYKYPEGSSEEREAFTRANHLNKLAEKEETGMAMRIRVGQSMNMGSDFDVFAHITNNTAEEYVCRLLLCARTVSYNGILGPECGTKYLLNLNLEPFSEKSVPLCILYEKYRDCLTESNLIKVRALLVEPVINSYLLAERDLYLENPEIKIRILGEPKQKRKLVAEVSLQNPLPVALEGCTFTVEGAGLTEEQKTVEIPDPVEAGEEVKVRMDLLPLHMGLHKLVVNFESDKLKAVKGFRNVIIGPA

SEQ ID NO: 18292 - protein, 13 aa, Artificial Sequence
  Synthetic polypeptide
PLPPWIRAGLREV

SEQ ID NO: 18293 - protein, 12 aa, Artificial Sequence
  Synthetic polypeptide
PLTLASLDQSWS

SEQ ID NO: 18294 - protein, 310 aa, Artificial Sequence
  Synthetic polypeptide
PGPRTSHAKAKAEAAEQAALAANQESNIARTLARELAPDFYQPGPEYQKRRLLQEILENSESLLEPPDRGAGAAGLPQPPRESPQLHERETPRPEGGSPSPAGTPPQPKRPRPGVSKDGLLSPGAWNGEPSGEGSRSVTPSEGAGRRSPARPATERMAIEALQAPPAPSREPEVALYQGYHSYAVRTTPPEPPPFEDQPEPEVSGSESAPSSPATAPLQAPTLRGPEPARETPAKLEPKPIIPKAEPRAKARKTEARGLTKAGAKKKARKEAALAAEAEVEVEEVPNTILICMVILLNIGLAILFVHLLT

SEQ ID NO: 18295 - protein, 128 aa, Artificial Sequence
  Synthetic polypeptide
PWTSPTNDPVPGQATPRPKLRQRNRPPWLPTRSPTLLALWPGSWLRTSTSQVRNIRSAGCCRRSWRTRRACWSPPTGAPAQRASHSRPARARSCTSVRPLGPRVAPRHRPGRPRSPSGPGPGCPRTAC

SEQ ID NO: 18296 - protein, 25 aa, Artificial Sequence
  Synthetic polypeptide
THWCLDLGLPLQMTRSQDKPRQGQS

SEQ ID NO: 18297 - protein, 46 aa, Artificial Sequence
  Synthetic polypeptide
AAWWRSQGSGVPLPGLRAWFHTSCLTLVTLLESPELQSFIIKWEAV

SEQ ID NO: 18298 - protein, 104 aa, Artificial Sequence
  Synthetic polypeptide
AAWWRSQGSGVPLPGLRAWFHTSCLTLVTLLESPELQSFIIKWEAVKSGIHRTVHAGEVGSAEVVKEAVDILKTERLGHGYHTLEDQALYNRLRQENMHFEAQK

SEQ ID NO: 18299 - protein, 204 aa, Artificial Sequence
  Synthetic polypeptide
AAWWRSQGSGVPLPGLRAWFHTSCLTLVTLLESPELQSFIIKWEAVKSGIHRTVHAGEVGSAEVVKEAVDILKTERLGHGYHTLEDQALYNRLRQENMHFEICPWSSYLTGAWKPDTEHAVIRLKNDQANYSLNTDDPLIFKSTLDTDYQMTKRDMGFTEEEFKRLNINAAKSSFLPEDEKRELLDLLYKAYGMPPSASAGQNL

SEQ ID NO: 18300 - protein, 11 aa, Artificial Sequence
  Synthetic polypeptide
ASVLHHKMGGC

SEQ ID NO: 18301 - protein, 55 aa, Artificial Sequence
  Synthetic polypeptide
ASVLHHKMGGCEERHSPYCPRRGGGLGRSSKRGCGHTQDRAAGTRLPHPGRPGPL

SEQ ID NO: 18302 - protein, 4 aa, Artificial Sequence
  Synthetic polypeptide
NGRL

SEQ ID NO: 18303 - protein, 185 aa, Artificial Sequence
  Synthetic polypeptide
AYHECCWKHQVVELCKKYQQQTVVAIDLAGDETIPGSSLLPGHVQAYQAVDILKTERLGHGYHTLEDQALYNRLRQENMHFEICPWSSYLTGAWKPDTEHAVIRLKNDQANYSLNTDDPLIFKSTLDTDYQMTKRDMGFTEEEFKRLNINAAKSSFLPEDEKRELLDLLYKAYGMPPSASAGQNL

SEQ ID NO: 18304 - protein, 109 aa, Artificial Sequence
  Synthetic polypeptide
AYHECCWKHQVVELCKKYQQQTVVAIDLAGDETIPGSSLLPGHVQAYQEAVKSGIHRTVHAGEVGSAEVVKEAVDILKTERLGHGYHTLEDQALYNRLRQENMHFEAQK

SEQ ID NO: 18305 - protein, 209 aa, Artificial Sequence
  Synthetic polypeptide
AYHECCWKHQVVELCKKYQQQTVVAIDLAGDETIPGSSLLPGHVQAYQEAVKSGIHRTVHAGEVGSAEVVKEAVDILKTERLGHGYHTLEDQALYNRLRQENMHFEICPWSSYLTGAWKPDTEHAVIRLKNDQANYSLNTDDPLIFKSTLDTDYQMTKRDMGFTEEEFKRLNINAAKSSFLPEDEKRELLDLLYKAYGMPPSASAGQNL

SEQ ID NO: 18306 - protein, 33 aa, Artificial Sequence
  Synthetic polypeptide
SVSSSAHGNKPTMSVVGNTRWWSCVRSTSSRPW

SEQ ID NO: 18307 - protein, 11 aa, Artificial Sequence
  Synthetic polypeptide
VLLETPGGGAV

SEQ ID NO: 18308 - protein, 335 aa, Artificial Sequence
  Synthetic polypeptide
APTLALWPQLWLPSNLFPTQQPEELSKRRRGIALPANTAEGLLNVIGMDKPLTLPDFLAKFDYYMPAIAGCREAIKRIAYEFVEMKAKEGVVYVEVRYSPHLLANSKVEPIPWNQAEGDLTPDEVVALVGQGLQEGERDFGVKARSILCCMRHQPNWSPKVVELCKKYQQQTVVAIDLAGDETIPGSSLLPGHVQAYQAVDILKTERLGHGYHTLEDQALYNRLRQENMHFEICPWSSYLTGAWKPDTEHAVIRLKNDQANYSLNTDDPLIFKSTLDTDYQMTKRDMGFTEEEFKRLNINAAKSSFLPEDEKRELLDLLYKAYGMPPSASAGQNL

SEQ ID NO: 18309 - protein, 259 aa, Artificial Sequence
  Synthetic polypeptide
APTLALWPQLWLPSNLFPTQQPEELSKRRRGIALPANTAEGLLNVIGMDKPLTLPDFLAKFDYYMPAIAGCREAIKRIAYEFVEMKAKEGVVYVEVRYSPHLLANSKVEPIPWNQAEGDLTPDEVVALVGQGLQEGERDFGVKARSILCCMRHQPNWSPKVVELCKKYQQQTVVAIDLAGDETIPGSSLLPGHVQAYQEAVKSGIHRTVHAGEVGSAEVVKEAVDILKTERLGHGYHTLEDQALYNRLRQENMHFEAQK

SEQ ID NO: 18310 - protein, 359 aa, Artificial Sequence
  Synthetic polypeptide
APTLALWPQLWLPSNLFPTQQPEELSKRRRGIALPANTAEGLLNVIGMDKPLTLPDFLAKFDYYMPAIAGCREAIKRIAYEFVEMKAKEGVVYVEVRYSPHLLANSKVEPIPWNQAEGDLTPDEVVALVGQGLQEGERDFGVKARSILCCMRHQPNWSPKVVELCKKYQQQTVVAIDLAGDETIPGSSLLPGHVQAYQEAVKSGIHRTVHAGEVGSAEVVKEAVDILKTERLGHGYHTLEDQALYNRLRQENMHFEICPWSSYLTGAWKPDTEHAVIRLKNDQANYSLNTDDPLIFKSTLDTDYQMTKRDMGFTEEEFKRLNINAAKSSFLPEDEKRELLDLLYKAYGMPPSASAGQNL

SEQ ID NO: 18311 - protein, 71 aa, Artificial Sequence
  Synthetic polypeptide
APTLALWPQLWLPSNLFPTQQPEELSKRRRGIALPANTAEGLLNVIGMDKPLTLPDFLAKFDYYMPAIARL

SEQ ID NO: 18312 - protein, 38 aa, Artificial Sequence
  Synthetic polypeptide
LSGLSSGFPPICFPRSSQRSFQKGGEGSPSQLTQQRGC

SEQ ID NO: 18313 - protein, 35 aa, Artificial Sequence
  Synthetic polypeptide
PHISSLASALASLQFVSHAAARGAFKKEERDRPPS

SEQ ID NO: 18314 - protein, 9 aa, Artificial Sequence
  Synthetic polypeptide
NRRNPDGCA

SEQ ID NO: 18315 - protein, 13 aa, Artificial Sequence
  Synthetic polypeptide
PFRASVSSSIKQA

SEQ ID NO: 18316 - protein, 623 aa, Artificial Sequence; identical to SEQ ID NO: 1887
  Synthetic polypeptide

SEQ ID NO: 18317 - protein, 24 aa, Artificial Sequence
  Synthetic polypeptide
AILDLPVSCSSGLGSDARNPDGCA

SEQ ID NO: 18318 - protein, 608 aa, Artificial Sequence
  Synthetic polypeptide
AQMRVIRTAVPDLDRESQERYEVVIQATDMAGQLGGLSGSTTVTIVVTDVNDNPPRFPQKMYQFSIQESAPIGTAVGRVKAEDSDVGENTDMTYHLKDESSSGGDVFKVTTDSDTQEAIIVVQKRLDFESQPVHTVILEALNKFVDPRFADLGTFRDQAIVRVAVTDVDEPPEFRPPSGLLEVQEDAQVGSLVGVVTARDPDAANRPVRYAIDRESDLDQIFDIDADTGAIVTGKGLDRETAGWHNITVLAMEADNHAQLSRASLRIRILDVNDNPPELATPYEAAVCEDAKPGQLIQTISVVDRDEPQGGHRFYFRLVPEAPSNPHFSLLDIQDNTAAVHTQHVGFNRQEQDVFFLPILVVDSGPPTLSSTGTLTIRICGCDSSGTIQSCNTTAFVMAASLSPGALIALLVCVLILVVLVLLILTLRRHHKSHLSSDEDEDMRDNVIKYNDEGGGEQDTEAYDMSALRSLYDFGELKGGDGGGSAGGGAGGGSGGGAGSPPQAHLPSERHSLPQGPPSPEPDFSVFRDFISRKVALADGDLSVPPYDAFQTYAFEGADSPAASLSSLHSGSSGSEQDFAYLSSWGPRFRPLAALYAGHRGDDEAQAS

SEQ ID NO: 18319 - protein, 19 aa, Artificial Sequence
  Synthetic polypeptide
MSHLGPSSQLLLRFRLRCA

SEQ ID NO: 18320 - protein, 34 aa, Artificial Sequence
  Synthetic polypeptide
GSVKIEGSQAFTDLGLCPGSITSWLCDLGCGQAS

SEQ ID NO: 18321 - protein, 61 aa, Artificial Sequence
  Synthetic polypeptide
RLKGPRHLPTWVCVLAPSLPGCAILGADRPPDEPDGCPAAQFGYEYLGTDHLPAGHLPGLG

SEQ ID NO: 18322 - protein, 81 aa, Artificial Sequence
  Synthetic polypeptide
RVPGIYRPGSVSWLHHFLAVRSWVRTGLLMNLMGVLLLSLAMNTWAQTIFQLGTFPDWADMYSVNVTALPPTLANDTFRTL

SEQ ID NO: 18323 - protein, 36 aa, Artificial Sequence
  Synthetic polypeptide
AKQPDTLQAHSCWKAAACLSSCSWRCTGARRPCRSQ

SEQ ID NO: 18324 - protein, 95 aa, Artificial Sequence
  Synthetic polypeptide
ATDTHNCVEESHRHHAEQNSQTHFKLILVGRPLLVCHPAHGGVLVHGGPAALSDGAAAHRPLPLHGHLALQQGLPPVLPRHQLPLPQWADHGQRH

SEQ ID NO: 18325 - protein, 623 aa, Artificial Sequence
  Synthetic polypeptide
YKCPPAGKCTNKFSSIHRMEYYSAAKKNRLLIHTTAWRNLTDITLSKTARHTSSSFLLEGRCLFVILLMAVYWCTEALPLSVTALLPIVLFPFMGILPSNKVCPQYFLDTNFLFLSGLIMASAIEEWNLHRRIALKILMLVGVQPARLILGMMVTTSFLSMWLSNTASTAMMLPIANAILKSLFGQKEVRKDPSQESEENTAAVRRNGLHTVPTEMQFLASTEAKDHPGETEVPLDLPADSRKEDEYRRNIWKGFLISIPYSASIGGTATLTGTAPNLILLGQLKSFFPQCDVVNFGSWFIFAFPLMLLFLLAGWLWISFLYGGLSFRGWRKNKSEIRTNAEDRARAVIREEYQNLGPIKFAEQAVFILFCMFAILLFTRDPKFIPGWASLFNPGFLSDAVTGVAIVTILFFFPSQRPSLKWWFDFKAPNTETEPLLTWKKAQETVPWNIILLLGGGFAMAKGCEESGLSVWIGGQLHPLENVPPALAVLLITVVIAFFTEFASNTATIIIFLPVLAELAIRLRVHPLYLMIPGTVGCSFAFMLPVSTPPNSIAFASGHLLVKDMVRTGLLMNLMGVLLLSLAMNTWAQTIFQLGTFPDWADMYSVNVTALPPTLANDTFRTL

SEQ ID NO: 18326 - protein, 359 aa, Artificial Sequence
  Synthetic polypeptide
YKCPPAGKCTNKFSSIHRMEYYSAAKKNRLLIHTTAWRNLTDITLSKTARHTSSSFLLEGRCLFVILLMAVYWCTEALPLSVTALLPIVLFPFMGILPSNKVCPQYFLDTNFLFLSGLIMASAIEEWNLHRRIALKILMLVGVQPARLILGMMVTTSFLSMWLSNTASTAMMLPIANAILKSLFGQKEVRKDPSQESEENTAKTTLGRQRFHWICRLTPGRRMNIVGTSGRASSSPSPTQPVLGAQPHSRAQPLTSSCLASSRGWLWISFLYGGLSFRGWRKNKSEIRTNAEDRARAVIREEYQNLGPIKFAEQAVFILFCMFAILLFTRDPKFIPGWASLFNPGCKMGIISISTIQKM

SEQ ID NO: 18327 - protein, 573 aa, Artificial Sequence
  Synthetic polypeptide
YKCPPAGKCTNKFSSIHRMEYYSAAKKNRLLIHTTAWRNLTDITLSKTARHTSSSFLLEGRCLFVILLMAVYWCTEALPLSVTALLPIVLFPFMGILPSNKVCPQYFLDTNFLFLSGLIMASAIEEWNLHRRIALKILMLVGVQPARLILGMMVTTSFLSMWLSNTASTAMMLPIANAILKSLFGQKEVRKDPSQESEENTAKTTLGRQRFHWICRLTPGRRMNIVGTSGRASSSPSPTQPVLGAQPHSRAQPLTSSCLASSRGWLWISFLYGGLSFRGWRKNKSEIRTNAEDRARAVIREEYQNLGPIKFAEQAVFILFCMFAILLFTRDPKFIPGWASLFNPGFLSDAVTGVAIVTILFFFPSQRPSLKWWFDFKAPNTETEPLLTWKKAQETVPWNIILLLGGGFAMAKGCEESGLSVWIGGQLHPLENVPPALAVLLITVVIAFFTEFASNTATIIIFLPVLAELAIRLRVHPLYLMIPGTVGCSFAFMLPVSTPPNSIAFASGHLLVKDMVRTGLLMNLMGVLLLSLAMNTWAQTIFQLGTFPDWADMYSVNVTALPPTLANDTFRTL

SEQ ID NO: 18328 - protein, 253 aa, Artificial Sequence
  Synthetic polypeptide
YKCPPAGKCTNKFSSIHRMEYYSAAKKNRLLIHTTAWRNLTDITLSKTARHTSSSFLLEGRCLFVILLMAVYWCTEALPLSVTALLPIVLFPFMGILPSNKVCPQYFLDTNFLFLSGLIMASAIEEWNLHRRIALKILMLVGVQPARLILGMMVTTSFLSMWLSNTASTAMMLPIANAILKSLFGQKEVRKDPSQESEENTGIEPNTFLSEERLKLQAPLVIRLGQITESGQWNMSGNDVCNFRVLSFLPGGM

SEQ ID NO: 18329 - protein, 25 aa, Artificial Sequence
  Synthetic polypeptide
DRKAAACLSSCSWRCTGARRPCRSQ

SEQ ID NO: 18330 - protein, 572 aa, Artificial Sequence; identical to SEQ ID NO: 1915
  Synthetic polypeptide

SEQ ID NO: 18331 - protein, 308 aa, Artificial Sequence; identical to SEQ ID NO: 2471
  Synthetic polypeptide

SEQ ID NO: 18332 - protein, 522 aa, Artificial Sequence; identical to SEQ ID NO: 1984
  Synthetic polypeptide

SEQ ID NO: 18333 - protein, 202 aa, Artificial Sequence; identical to SEQ ID NO: 2860
  Synthetic polypeptide

SEQ ID NO: 18334 - protein, 69 aa, Artificial Sequence; identical to SEQ ID NO: 4230
  Synthetic polypeptide

SEQ ID NO: 18335 - protein, 368 aa, Artificial Sequence
  Synthetic polypeptide
GIPSHAELGLIMASAIEEWNLHRRIALKILMLVGVQPARLILGMMVTTSFLSMWLSNTASTAMMLPIANAILKSLFGQKEVRKDPSQESEENTAAVRRNGLHTVPTEMQFLASTEAKDHPGETEVPLDLPADSRKEDEYRRNIWKGFLISIPYSASIGGTATLTGTAPNLILLGQLKSFFPQCDVVNFGSWFIFAFPLMLLFLLAGWLWISFLYGGLSFRGWRKNKSEIRTNAEDRARAVIREEYQNLGPIKFAEQAVFILFCMFAILLFTRDPKFIPGWASLFNPGFLSDAVTGVAIVTILFFFPSQRPSLKWWFDFKAPNTETEPLLTWKKAQETVPWNIILLLGGGFAMAKGCEESGLSVWIGGQ

SEQ ID NO: 18336 - protein, 515 aa, Artificial Sequence
  Synthetic polypeptide
GIPSHAELGLIMASAIEEWNLHRRIALKILMLVGVQPARLILGMMVTTSFLSMWLSNTASTAMMLPIANAILKSLFGQKEVRKDPSQESEENTAAVRRNGLHTVPTEMQFLASTEAKDHPGETEVPLDLPADSRKEDEYRRNIWKGFLISIPYSASIGGTATLTGTAPNLILLGQLKSFFPQCDVVNFGSWFIFAFPLMLLFLLAGWLWISFLYGGLSFRGWRKNKSEIRTNAEDRARAVIREEYQNLGPIKFAEQAVFILFCMFAILLFTRDPKFIPGWASLFNPGFLSDAVTGVAIVTILFFFPSQRPSLKWWFDFKAPNTETEPLLTWKKAQETVPWNIILLLGGGFAMAKGCEESGLSVWIGGQLHPLENVPPALAVLLITVVIAFFTEFASNTATIIIFLPVLAELAIRLRVHPLYLMIPGTVGCSFAFMLPVSTPPNSIAFASGHLLVKDMVRTGLLMNLMGVLLLSLAMNTWAQTIFQLGTFPDWADMYSVNVTALPPTLANDTFRTL

SEQ ID NO: 18337 - protein, 480 aa, Artificial Sequence
  Synthetic polypeptide
GIPSHAELGLIMASAIEEWNLHRRIALKILMLVGVQPARLILGMMVTTSFLSMWLSNTASTAMMLPIANAILKSLFGQKEVRKDPSQESEENTAAVRRNGLHTVPTEMQFLASTEAKDHPGETEVPLDLPADSRKEDEYRRNIWKGFLISIPYSASIGGTATLTGTAPNLILLGQLKSFFPQCDVVNFGSWFIFAFPLMLLFLLAGWLWISFLYGGLSFRGWRKNKSEIRTNAEDRARAVIREEYQNLGPIKFLSDAVTGVAIVTILFFFPSQRPSLKWWFDFKAPNTETEPLLTWKKAQETVPWNIILLLGGGFAMAKGCEESGLSVWIGGQLHPLENVPPALAVLLITVVIAFFTEFASNTATIIIFLPVLAELAIRLRVHPLYLMIPGTVGCSFAFMLPVSTPPNSIAFASGHLLVKDMVRTGLLMNLMGVLLLSLAMNTWAQTIFQLGTFPDWADMYSVNVTALPPTLANDTFRTL

SEQ ID NO: 18338 - protein, 251 aa, Artificial Sequence
  Synthetic polypeptide
GIPSHAELGLIMASAIEEWNLHRRIALKILMLVGVQPARLILGMMVTTSFLSMWLSNTASTAMMLPIANAILKSLFGQKEVRKDPSQESEENTAKTTLGRQRFHWICRLTPGRRMNIVGTSGRASSSPSPTQPVLGAQPHSRAQPLTSSCLASSRGWLWISFLYGGLSFRGWRKNKSEIRTNAEDRARAVIREEYQNLGPIKFAEQAVFILFCMFAILLFTRDPKFIPGWASLFNPGCKMGIISISTIQKM

SEQ ID NO: 18339 - protein, 465 aa, Artificial Sequence
  Synthetic polypeptide
GIPSHAELGLIMASAIEEWNLHRRIALKILMLVGVQPARLILGMMVTTSFLSMWLSNTASTAMMLPIANAILKSLFGQKEVRKDPSQESEENTAKTTLGRQRFHWICRLTPGRRMNIVGTSGRASSSPSPTQPVLGAQPHSRAQPLTSSCLASSRGWLWISFLYGGLSFRGWRKNKSEIRTNAEDRARAVIREEYQNLGPIKFAEQAVFILFCMFAILLFTRDPKFIPGWASLFNPGFLSDAVTGVAIVTILFFFPSQRPSLKWWFDFKAPNTETEPLLTWKKAQETVPWNIILLLGGGFAMAKGCEESGLSVWIGGQLHPLENVPPALAVLLITVVIAFFTEFASNTATIIIFLPVLAELAIRLRVHPLYLMIPGTVGCSFAFMLPVSTPPNSIAFASGHLLVKDMVRTGLLMNLMGVLLLSLAMNTWAQTIFQLGTFPDWADMYSVNVTALPPTLANDTFRTL

SEQ ID NO: 18340 - protein, 145 aa, Artificial Sequence
  Synthetic polypeptide
GIPSHAELGLIMASAIEEWNLHRRIALKILMLVGVQPARLILGMMVTTSFLSMWLSNTASTAMMLPIANAILKSLFGQKEVRKDPSQESEENTGIEPNTFLSEERLKLQAPLVIRLGQITESGQWNMSGNDVCNFRVLSFLPGGM

SEQ ID NO: 18341 - protein, 9 aa, Artificial Sequence
  Synthetic polypeptide
TWADHGQRH

SEQ ID NO: 18342 - protein, 43 aa, Artificial Sequence
  Synthetic polypeptide
WFYKGLFPLVRHFLLPRGEGCVCFPICHDYKFSEASPAMLNLG

SEQ ID NO: 18343 - protein, 31 aa, Artificial Sequence; identical to SEQ ID NO: 6387
  Synthetic polypeptide

SEQ ID NO: 18344 - protein, 566 aa, Artificial Sequence
  Synthetic polypeptide
TEGRCLFVILLMAVYWCTEALPLSVTALLPIVLFPFMGILPSNKVCPQYFLDTNFLFLSGLIMASAIEEWNLHRRIALKILMLVGVQPARLILGMMVTTSFLSMWLSNTASTAMMLPIANAILKSLFGQKEVRKDPSQESEENTAAVRRNGLHTVPTEMQFLASTEAKDHPGETEVPLDLPADSRKEDEYRRNIWKGFLISIPYSASIGGTATLTGTAPNLILLGQLKSFFPQCDVVNFGSWFIFAFPLMLLFLLAGWLWISFLYGGLSFRGWRKNKSEIRTNAEDRARAVIREEYQNLGPIKFAEQAVFILFCMFAILLFTRDPKFIPGWASLFNPGFLSDAVTGVAIVTILFFFPSQRPSLKWWFDFKAPNTETEPLLTWKKAQETVPWNIILLLGGGFAMAKGCEESGLSVWIGGQLHPLENVPPALAVLLITVVIAFFTEFASNTATIIIFLPVLAELAIRLRVHPLYLMIPGTVGCSFAFMLPVSTPPNSIAFASGHLLVKDMVRTGLLMNLMGVLLLSLAMNTWAQTIFQLGTFPDWADMYSVNVTALPPTLANDTFRTL

SEQ ID NO: 18345 - protein, 302 aa, Artificial Sequence
  Synthetic polypeptide
TEGRCLFVILLMAVYWCTEALPLSVTALLPIVLFPFMGILPSNKVCPQYFLDTNFLFLSGLIMASAIEEWNLHRRIALKILMLVGVQPARLILGMMVTTSFLSMWLSNTASTAMMLPIANAILKSLFGQKEVRKDPSQESEENTAKTTLGRQRFHWICRLTPGRRMNIVGTSGRASSSPSPTQPVLGAQPHSRAQPLTSSCLASSRGWLWISFLYGGLSFRGWRKNKSEIRTNAEDRARAVIREEYQNLGPIKFAEQAVFILFCMFAILLFTRDPKFIPGWASLFNPGCKMGIISISTIQKM

SEQ ID NO: 18346 - protein, 516 aa, Artificial Sequence
  Synthetic polypeptide
TEGRCLFVILLMAVYWCTEALPLSVTALLPIVLFPFMGILPSNKVCPQYFLDTNFLFLSGLIMASAIEEWNLHRRIALKILMLVGVQPARLILGMMVTTSFLSMWLSNTASTAMMLPIANAILKSLFGQKEVRKDPSQESEENTAKTTLGRQRFHWICRLTPGRRMNIVGTSGRASSSPSPTQPVLGAQPHSRAQPLTSSCLASSRGWLWISFLYGGLSFRGWRKNKSEIRTNAEDRARAVIREEYQNLGPIKFAEQAVFILFCMFAILLFTRDPKFIPGWASLFNPGFLSDAVTGVAIVTILFFFPSQRPSLKWWFDFKAPNTETEPLLTWKKAQETVPWNIILLLGGGFAMAKGCEESGLSVWIGGQLHPLENVPPALAVLLITVVIAFFTEFASNTATIIIFLPVLAELAIRLRVHPLYLMIPGTVGCSFAFMLPVSTPPNSIAFASGHLLVKDMVRTGLLMNLMGVLLLSLAMNTWAQTIFQLGTFPDWADMYSVNVTALPPTLANDTFRTL

SEQ ID NO: 18347 - protein, 196 aa, Artificial Sequence
  Synthetic polypeptide
TEGRCLFVILLMAVYWCTEALPLSVTALLPIVLFPFMGILPSNKVCPQYFLDTNFLFLSGLIMASAIEEWNLHRRIALKILMLVGVQPARLILGMMVTTSFLSMWLSNTASTAMMLPIANAILKSLFGQKEVRKDPSQESEENTGIEPNTFLSEERLKLQAPLVIRLGQITESGQWNMSGNDVCNFRVLSFLPGGM

SEQ ID NO: 18348 - protein, 306 aa, Artificial Sequence
  Synthetic polypeptide
GAREFKQKEECTIRGRSLIQISIQEDPWNLPNSIKTLVDNIQRYVEDGKNQLLLALLKCTDTELQLRRDAIFCQALVAAVCTFSKQLLAALGYRYNNNGEYEESSRDASRKWLEQVAATGVLLHCQSLLSPATVKEERTMLEDIWVTLSELDNVTFSFKQLDENYVANTNVFYHIEGSRQALKVIFYLDSYHFSKLPSRLEGGASLRLHTALFTKGELQAWGREDHGGRAKATKHTGSQPPARPRHLPSQCWRTWRGCLLQAARPRRICSRTSTRSPWRKFSSITANSGHFTWSGLTCPRMPAPRR

SEQ ID NO: 18349 - protein, 404 aa, Artificial Sequence
  Synthetic polypeptide
GAREFKQKEECTIRGRSLIQISIQEDPWNLPNSIKTLVDNIQRYVEDGKNQLLLALLKCTDTELQLRRDAIFCQALVAAVCTFSKQLLAALGYRYNNNGEYEESSRDASRKWLEQVAATGVLLHCQSLLSPATVKEERTMLEDIWVTLSELDNVTFSFKQLDENYVANTNVFYHIEGSRQALKVIFYLDSYHFSKLPSRLEGGASLRLHTALFTKVLENVEGLPSPGSQAAEDLQQDINAQSLEKVQQYYRKLRAFYLERSNLPTDASTTAVKIDQLIRPINALDELCRLMKSFVHPKPGAAGSVGAGLIPISSELCYRLGACQMVMCGTGMQRSTLSVSLEQAAILARSHGLLPKCIMQATDIMRKQGPRVEILAKNLRVKDQMPQGAPRLYRLCQPPVDGDL

SEQ ID NO: 18350 - protein, 17 aa, Artificial Sequence
  Synthetic polypeptide
GPESLNRKKSVQSVAGA

SEQ ID NO: 18351 - protein, 5 aa, Artificial Sequence
  Synthetic polypeptide
WGQRV

SEQ ID NO: 18352 - protein, 1011 aa, Artificial Sequence
  Synthetic polypeptide
AIFLFLEHSSEPLHLQFPLPGCPACLIPAVLEKSEFRDESQYFRFHADEEMEGTSSKNKQLRNDFKLVENILAKRLLILPQEEDYGFDIEEKNKAVVVKSVQRGSLAEVAGLQVGRKIYSINEDLVFLRPFSEVESILNQSFCSRRPLRLLVATKAKEIIKIPDQPDTLCFQIRGAAPPYVYAVGRGSEAMAAGLCAGQCILKVNGSNVMNDGAPEVLEHFQAFRSRREEALGLYQWIYHTHEDAQEARASQEASTEDPSGEQAQEEDQADSAFPLLSLGPRLSLCEDSPMVTLTVDNVHLEHGVVYEYVSTAGVRCHVLEKIVEPRGCFGLTAKILEAFAANDSVFVENCRRLMALSSAIVTMPHFEFRNICDTKLESIGQRIACYQEFAAQLKSRVSPPFKQAPLEPHPLCGLDFCPTNCHINLMEVSYPKTTPSVGRSFSIRFGRKPSLIGLDPEQGHLNPMSYTQHCITTMAAPSWKCLPAAEGDPQGQGLHDGSFGPASGTLGQEDRGLSFLLKQEDREIQDAYLQLFTKLDVALKEMKQYVTQINRLLSTITEPTSGGSCDASLAEEASSLPLVSEESEMDRSDHGGIKKVCFKVAEEDQEDSGHDTMSYRDSYSECNSNRDSVLSYTSVRSNSSYLGSDEMGSGDELPCDMRIPSDKQDKLHGCLEHLFNQVDSINALLKGPVMSRAFEETKHFPMNHSLQEFKQKEECTIRGRSLIQISIQEDPWNLPNSIKTLVDNIQRYVEDGKNQLLLALLKCTDTELQLRRDAIFCQALVAAVCTFSKQLLAALGYRYNNNGEYEESSRDASRKWLEQVAATGVLLHCQSLLSPATVKEERTMLEDIWVTLSELDNVTFSFKQLDENYVANTNVFYHIEGSRQALKVIFYLDSYHFSKLPSRLEGGASLRLHTALFTKGELQAWGREDHGGRAKATKHTGSQPPARPRHLPSQCWRTWRGCLLQAARPRRICSRTSTRSPWRKFSSITANSGHFTWSGLTCPRMPAPRR

SEQ ID NO: 18353 - protein, 1109 aa, Artificial Sequence
  Synthetic polypeptide
AIFLFLEHSSEPLHLQFPLPGCPACLIPAVLEKSEFRDESQYFRFHADEEMEGTSSKNKQLRNDFKLVENILAKRLLILPQEEDYGFDIEEKNKAVVVKSVQRGSLAEVAGLQVGRKIYSINEDLVFLRPFSEVESILNQSFCSRRPLRLLVATKAKEIIKIPDQPDTLCFQIRGAAPPYVYAVGRGSEAMAAGLCAGQCILKVNGSNVMNDGAPEVLEHFQAFRSRREEALGLYQWIYHTHEDAQEARASQEASTEDPSGEQAQEEDQADSAFPLLSLGPRLSLCEDSPMVTLTVDNVHLEHGVVYEYVSTAGVRCHVLEKIVEPRGCFGLTAKILEAFAANDSVFVENCRRLMALSSAIVTMPHFEFRNICDTKLESIGQRIACYQEFAAQLKSRVSPPFKQAPLEPHPLCGLDFCPTNCHINLMEVSYPKTTPSVGRSFSIRFGRKPSLIGLDPEQGHLNPMSYTQHCITTMAAPSWKCLPAAEGDPQGQGLHDGSFGPASGTLGQEDRGLSFLLKQEDREIQDAYLQLFTKLDVALKEMKQYVTQINRLLSTITEPTSGGSCDASLAEEASSLPLVSEESEMDRSDHGGIKKVCFKVAEEDQEDSGHDTMSYRDSYSECNSNRDSVLSYTSVRSNSSYLGSDEMGSGDELPCDMRIPSDKQDKLHGCLEHLFNQVDSINALLKGPVMSRAFEETKHFPMNHSLQEFKQKEECTIRGRSLIQISIQEDPWNLPNSIKTLVDNIQRYVEDGKNQLLLALLKCTDTELQLRRDAIFCQALVAAVCTFSKQLLAALGYRYNNNGEYEESSRDASRKWLEQVAATGVLLHCQSLLSPATVKEERTMLEDIWVTLSELDNVTFSFKQLDENYVANTNVFYHIEGSRQALKVIFYLDSYHFSKLPSRLEGGASLRLHTALFTKVLENVEGLPSPGSQAAEDLQQDINAQSLEKVQQYYRKLRAFYLERSNLPTDASTTAVKIDQLIRPINALDELCRLMKSFVHPKPGAAGSVGAGLIPISSELCYRLGACQMVMCGTGMQRSTLSVSLEQAAILARSHGLLPKCIMQATDIMRKQGPRVEILAKNLRVKDQMPQGAPRLYRLCQPPVDGDL

SEQ ID NO: 18354 - protein, 37 aa, Artificial Sequence
  Synthetic polypeptide
HFPVSRTFLRAFALAVSLARVPCLPHPCSAGEERVQG

SEQ ID NO: 18355 - protein, 70 aa, Artificial Sequence
  Synthetic polypeptide
NIPQSLCTCSFPCQGALPASSLQCWRRASSGMSPSTSAFMLTRRWRGPAARTNSFATTSSWWRTFWPSAC

SEQ ID NO: 18356 - protein, 46 aa, Artificial Sequence
  Synthetic polypeptide
GLLSHVELSCSRTSKTSWKFIRISWPPWSIVYTRSRSLSMNLGMFS

SEQ ID NO: 18357 - protein, 32 aa, Artificial Sequence
  Synthetic polypeptide
LYFSFAFCLDCEASSAMWNCPVLEHRRHPGSS

SEQ ID NO: 18358 - protein, 1504 aa, Artificial Sequence
  Synthetic polypeptide
WFYKGEFPYTSSLACRHVRHNFTSHLPSALIVRPPQPCGTVLFSNIEDILEVHKDFLAALEYCLHPEPQSQHELGNVFLKFKDKFCVYEEYCSNHEKALRLLVELNKIPTVRAFLLSCMLLGGRKTTDIPLEGYLLSPIQRICKYPLLLKELAKRTPGKHPDHPAVQSALQAMKTVCSNINETKRQMEKLEALEQLQSHIEGWEGSNLTDICTQLLLQGTLLKISAGNIQERAFFLFDNLLVYCKRKSRVTGSKKSTKRTKSINGSLYIFRGRINTEVMEVENVEDGTADYHSNGYTVTNGWKIHNTAKNKWFVCMAKTAEEKQKWLDAIIREREQRESLKLGMERDAYVMIAEKGEKLYHMMMNKKVNLIKDRRRKLSTVPKCFLGNEFVAWLLEIGEISKTEEGVNLGQALLENGIIHHVSDKHQFKNEQVMYRFRYDDGTYKARSELEDIMSKGVRLYCRLHSLYTPVIKDRDYHLKTYKSVLPGSKLVDWLLAQGDCQTREEAVALGVGLCNNGFMHHVLEKSEFRDESQYFRFHADEEMEGTSSKNKQLRNDFKLVENILAKRLLILPQEEDYGFDIEEKNKAVVVKSVQRGSLAEVAGLQVGRKIYSINEDLVFLRPFSEVESILNQSFCSRRPLRLLVATKAKEIIKIPDQPDTLCFQIRGAAPPYVYAVGRGSEAMAAGLCAGQCILKVNGSNVMNDGAPEVLEHFQAFRSRREEALGLYQWIYHTHEDAQEARASQEASTEDPSGEQAQEEDQADSAFPLLSLGPRLSLCEDSPMVTLTVDNVHLEHGVVYEYVSTAGVRCHVLEKIVEPRGCFGLTAKILEAFAANDSVFVENCRRLMALSSAIVTMPHFEFRNICDTKLESIGQRIACYQEFAAQLKSRVSPPFKQAPLEPHPLCGLDFCPTNCHINLMEVSYPKTTPSVGRSFSIRFGRKPSLIGLDPEQGHLNPMSYTQHCITTMAAPSWKCLPAAEGDPQGQGLHDGSFGPASGTLGQEDRGLSFLLKQEDREIQDAYLQLFTKLDVALKEMKQYVTQINRLLSTITEPTSGGSCDASLAEEASSLPLVSEESEMDRSDHGGIKKVCFKVAEEDQEDSGHDTMSYRDSYSECNSNRDSVLSYTSVRSNSSYLGSDEMGSGDELPCDMRIPSDKQDKLHGCLEHLFNQVDSINALLKGPVMSRAFEETKHFPMNHSLQEFKQKEECTIRGRSLIQISIQEDPWNLPNSIKTLVDNIQRYVEDGKNQLLLALLKCTDTELQLRRDAIFCQALVAAVCTFSKQLLAALGYRYNNNGEYEESSRDASRKWLEQVAATGVLLHCQSLLSPATVKEERTMLEDIWVTLSELDNVTFSFKQLDENYVANTNVFYHIEGSRQALKVIFYLDSYHFSKLPSRLEGGASLRLHTALFTKGELQAWGREDHGGRAKATKHTGSQPPARPRHLPSQCWRTWRGCLLQAARPRRICSRTSTRSPWRKFSSITANSGHFTWSGLTCPRMPAPRR

SEQ ID NO: 18359 - protein, 1602 aa, Artificial Sequence
  Synthetic polypeptide
WFYKGEFPYTSSLACRHVRHNFTSHLPSALIVRPPQPCGTVLFSNIEDILEVHKDFLAALEYCLHPEPQSQHELGNVFLKFKDKFCVYEEYCSNHEKALRLLVELNKIPTVRAFLLSCMLLGGRKTTDIPLEGYLLSPIQRICKYPLLLKELAKRTPGKHPDHPAVQSALQAMKTVCSNINETKRQMEKLEALEQLQSHIEGWEGSNLTDICTQLLLQGTLLKISAGNIQERAFFLFDNLLVYCKRKSRVTGSKKSTKRTKSINGSLYIFRGRINTEVMEVENVEDGTADYHSNGYTVTNGWKIHNTAKNKWFVCMAKTAEEKQKWLDAIIREREQRESLKLGMERDAYVMIAEKGEKLYHMMMNKKVNLIKDRRRKLSTVPKCFLGNEFVAWLLEIGEISKTEEGVNLGQALLENGIIHHVSDKHQFKNEQVMYRFRYDDGTYKARSELEDIMSKGVRLYCRLHSLYTPVIKDRDYHLKTYKSVLPGSKLVDWLLAQGDCQTREEAVALGVGLCNNGFMHHVLEKSEFRDESQYFRFHADEEMEGTSSKNKQLRNDFKLVENILAKRLLILPQEEDYGFDIEEKNKAVVVKSVQRGSLAEVAGLQVGRKIYSINEDLVFLRPFSEVESILNQSFCSRRPLRLLVATKAKEIIKIPDQPDTLCFQIRGAAPPYVYAVGRGSEAMAAGLCAGQCILKVNGSNVMNDGAPEVLEHFQAFRSRREEALGLYQWIYHTHEDAQEARASQEASTEDPSGEQAQEEDQADSAFPLLSLGPRLSLCEDSPMVTLTVDNVHLEHGVVYEYVSTAGVRCHVLEKIVEPRGCFGLTAKILEAFAANDSVFVENCRRLMALSSAIVTMPHFEFRNICDTKLESIGQRIACYQEFAAQLKSRVSPPFKQAPLEPHPLCGLDFCPTNCHINLMEVSYPKTTPSVGRSFSIRFGRKPSLIGLDPEQGHLNPMSYTQHCITTMAAPSWKCLPAAEGDPQGQGLHDGSFGPASGTLGQEDRGLSFLLKQEDREIQDAYLQLFTKLDVALKEMKQYVTQINRLLSTITEPTSGGSCDASLAEEASSLPLVSEESEMDRSDHGGIKKVCFKVAEEDQEDSGHDTMSYRDSYSECNSNRDSVLSYTSVRSNSSYLGSDEMGSGDELPCDMRIPSDKQDKLHGCLEHLFNQVDSINALLKGPVMSRAFEETKHFPMNHSLQEFKQKEECTIRGRSLIQISIQEDPWNLPNSIKTLVDNIQRYVEDGKNQLLLALLKCTDTELQLRRDAIFCQALVAAVCTFSKQLLAALGYRYNNNGEYEESSRDASRKWLEQVAATGVLLHCQSLLSPATVKEERTMLEDIWVTLSELDNVTFSFKQLDENYVANTNVFYHIEGSRQALKVIFYLDSYHFSKLPSRLEGGASLRLHTALFTKVLENVEGLPSPGSQAAEDLQQDINAQSLEKVQQYYRKLRAFYLERSNLPTDASTTAVKIDQLIRPINALDELCRLMKSFVHPKPGAAGSVGAGLIPISSELCYRLGACQMVMCGTGMQRSTLSVSLEQAAILARSHGLLPKCIMQATDIMRKQGPRVEILAKNLRVKDQMPQGAPRLYRLCQPPVDGDL

SEQ ID NO: 18360 - protein, 70 aa, Artificial Sequence
  Synthetic polypeptide
GLLSHVELHSCIASGRTWPTQWRRASRRRMSRSCSRTSKTSWKFIRISWPPWSIVYTRSRSLSMNLGMFS

SEQ ID NO: 18361 - protein, 56 aa, Artificial Sequence
  Synthetic polypeptide
LYFSFAFCLDCEASSAMWNCIPASHPAERGRLSGEGPHGGECQGPVLEHRRHPGSS

SEQ ID NO: 18362 - protein, 1528 aa, Artificial Sequence
  Synthetic polypeptide
WFYKGEFPYTSSLACRHVRHNFTSHLPSALIVRPPQPCGTAFLHRIRQNVADSVEKGLTEENVKVLFSNIEDILEVHKDFLAALEYCLHPEPQSQHELGNVFLKFKDKFCVYEEYCSNHEKALRLLVELNKIPTVRAFLLSCMLLGGRKTTDIPLEGYLLSPIQRICKYPLLLKELAKRTPGKHPDHPAVQSALQAMKTVCSNINETKRQMEKLEALEQLQSHIEGWEGSNLTDICTQLLLQGTLLKISAGNIQERAFFLFDNLLVYCKRKSRVTGSKKSTKRTKSINGSLYIFRGRINTEVMEVENVEDGTADYHSNGYTVTNGWKIHNTAKNKWFVCMAKTAEEKQKWLDAIIREREQRESLKLGMERDAYVMIAEKGEKLYHMMMNKKVNLIKDRRRKLSTVPKCFLGNEFVAWLLEIGEISKTEEGVNLGQALLENGIIHHVSDKHQFKNEQVMYRFRYDDGTYKARSELEDIMSKGVRLYCRLHSLYTPVIKDRDYHLKTYKSVLPGSKLVDWLLAQGDCQTREEAVALGVGLCNNGFMHHVLEKSEFRDESQYFRFHADEEMEGTSSKNKQLRNDFKLVENILAKRLLILPQEEDYGFDIEEKNKAVVVKSVQRGSLAEVAGLQVGRKIYSINEDLVFLRPFSEVESILNQSFCSRRPLRLLVATKAKEIIKIPDQPDTLCFQIRGAAPPYVYAVGRGSEAMAAGLCAGQCILKVNGSNVMNDGAPEVLEHFQAFRSRREEALGLYQWIYHTHEDAQEARASQEASTEDPSGEQAQEEDQADSAFPLLSLGPRLSLCEDSPMVTLTVDNVHLEHGVVYEYVSTAGVRCHVLEKIVEPRGCFGLTAKILEAFAANDSVFVENCRRLMALSSAIVTMPHFEFRNICDTKLESIGQRIACYQEFAAQLKSRVSPPFKQAPLEPHPLCGLDFCPTNCHINLMEVSYPKTTPSVGRSFSIRFGRKPSLIGLDPEQGHLNPMSYTQHCITTMAAPSWKCLPAAEGDPQGQGLHDGSFGPASGTLGQEDRGLSFLLKQEDREIQDAYLQLFTKLDVALKEMKQYVTQINRLLSTITEPTSGGSCDASLAEEASSLPLVSEESEMDRSDHGGIKKVCFKVAEEDQEDSGHDTMSYRDSYSECNSNRDSVLSYTSVRSNSSYLGSDEMGSGDELPCDMRIPSDKQDKLHGCLEHLFNQVDSINALLKGPVMSRAFEETKHFPMNHSLQEFKQKEECTIRGRSLIQISIQEDPWNLPNSIKTLVDNIQRYVEDGKNQLLLALLKCTDTELQLRRDAIFCQALVAAVCTFSKQLLAALGYRYNNNGEYEESSRDASRKWLEQVAATGVLLHCQSLLSPATVKEERTMLEDIWVTLSELDNVTFSFKQLDENYVANTNVFYHIEGSRQALKVIFYLDSYHFSKLPSRLEGGASLRLHTALFTKGELQAWGREDHGGRAKATKHTGSQPPARPRHLPSQCWRTWRGCLLQAARPRRICSRTSTRSPWRKFSSITANSGHFTWSGLTCPRMPAPRR

SEQ ID NO: 18363 - protein, 1626 aa, Artificial Sequence
  Synthetic polypeptide
WFYKGEFPYTSSLACRHVRHNFTSHLPSALIVRPPQPCGTAFLHRIRQNVADSVEKGLTEENVKVLFSNIEDILEVHKDFLAALEYCLHPEPQSQHELGNVFLKFKDKFCVYEEYCSNHEKALRLLVELNKIPTVRAFLLSCMLLGGRKTTDIPLEGYLLSPIQRICKYPLLLKELAKRTPGKHPDHPAVQSALQAMKTVCSNINETKRQMEKLEALEQLQSHIEGWEGSNLTDICTQLLLQGTLLKISAGNIQERAFFLFDNLLVYCKRKSRVTGSKKSTKRTKSINGSLYIFRGRINTEVMEVENVEDGTADYHSNGYTVTNGWKIHNTAKNKWFVCMAKTAEEKQKWLDAIIREREQRESLKLGMERDAYVMIAEKGEKLYHMMMNKKVNLIKDRRRKLSTVPKCFLGNEFVAWLLEIGEISKTEEGVNLGQALLENGIIHHVSDKHQFKNEQVMYRFRYDDGTYKARSELEDIMSKGVRLYCRLHSLYTPVIKDRDYHLKTYKSVLPGSKLVDWLLAQGDCQTREEAVALGVGLCNNGFMHHVLEKSEFRDESQYFRFHADEEMEGTSSKNKQLRNDFKLVENILAKRLLILPQEEDYGFDIEEKNKAVVVKSVQRGSLAEVAGLQVGRKIYSINEDLVFLRPFSEVESILNQSFCSRRPLRLLVATKAKEIIKIPDQPDTLCFQIRGAAPPYVYAVGRGSEAMAAGLCAGQCILKVNGSNVMNDGAPEVLEHFQAFRSRREEALGLYQWIYHTHEDAQEARASQEASTEDPSGEQAQEEDQADSAFPLLSLGPRLSLCEDSPMVTLTVDNVHLEHGVVYEYVSTAGVRCHVLEKIVEPRGCFGLTAKILEAFAANDSVFVENCRRLMALSSAIVTMPHFEFRNICDTKLESIGQRIACYQEFAAQLKSRVSPPFKQAPLEPHPLCGLDFCPTNCHINLMEVSYPKTTPSVGRSFSIRFGRKPSLIGLDPEQGHLNPMSYTQHCITTMAAPSWKCLPAAEGDPQGQGLHDGSFGPASGTLGQEDRGLSFLLKQEDREIQDAYLQLFTKLDVALKEMKQYVTQINRLLSTITEPTSGGSCDASLAEEASSLPLVSEESEMDRSDHGGIKKVCFKVAEEDQEDSGHDTMSYRDSYSECNSNRDSVLSYTSVRSNSSYLGSDEMGSGDELPCDMRIPSDKQDKLHGCLEHLFNQVDSINALLKGPVMSRAFEETKHFPMNHSLQEFKQKEECTIRGRSLIQISIQEDPWNLPNSIKTLVDNIQRYVEDGKNQLLLALLKCTDTELQLRRDAIFCQALVAAVCTFSKQLLAALGYRYNNNGEYEESSRDASRKWLEQVAATGVLLHCQSLLSPATVKEERTMLEDIWVTLSELDNVTFSFKQLDENYVANTNVFYHIEGSRQALKVIFYLDSYHFSKLPSRLEGGASLRLHTALFTKVLENVEGLPSPGSQAAEDLQQDINAQSLEKVQQYYRKLRAFYLERSNLPTDASTTAVKIDQLIRPINALDELCRLMKSFVHPKPGAAGSVGAGLIPISSELCYRLGACQMVMCGTGMQRSTLSVSLEQAAILARSHGLLPKCIMQATDIMRKQGPRVEILAKNLRVKDQMPQGAPRLYRLCQPPVDGDL

SEQ ID NO: 18364 - protein, 1496 aa, Artificial Sequence
  Synthetic polypeptide
EIPQTCGTAFLHRIRQNVADSVEKGLTEENVKVLFSNIEDILEVHKDFLAALEYCLHPEPQSQHELGNVFLKFKDKFCVYEEYCSNHEKALRLLVELNKIPTVRAFLLSCMLLGGRKTTDIPLEGYLLSPIQRICKYPLLLKELAKRTPGKHPDHPAVQSALQAMKTVCSNINETKRQMEKLEALEQLQSHIEGWEGSNLTDICTQLLLQGTLLKISAGNIQERAFFLFDNLLVYCKRKSRVTGSKKSTKRTKSINGSLYIFRGRINTEVMEVENVEDGTADYHSNGYTVTNGWKIHNTAKNKWFVCMAKTAEEKQKWLDAIIREREQRESLKLGMERDAYVMIAEKGEKLYHMMMNKKVNLIKDRRRKLSTVPKCFLGNEFVAWLLEIGEISKTEEGVNLGQALLENGIIHHVSDKHQFKNEQVMYRFRYDDGTYKARSELEDIMSKGVRLYCRLHSLYTPVIKDRDYHLKTYKSVLPGSKLVDWLLAQGDCQTREEAVALGVGLCNNGFMHHVLEKSEFRDESQYFRFHADEEMEGTSSKNKQLRNDFKLVENILAKRLLILPQEEDYGFDIEEKNKAVVVKSVQRGSLAEVAGLQVGRKIYSINEDLVFLRPFSEVESILNQSFCSRRPLRLLVATKAKEIIKIPDQPDTLCFQIRGAAPPYVYAVGRGSEAMAAGLCAGQCILKVNGSNVMNDGAPEVLEHFQAFRSRREEALGLYQWIYHTHEDAQEARASQEASTEDPSGEQAQEEDQADSAFPLLSLGPRLSLCEDSPMVTLTVDNVHLEHGVVYEYVSTAGVRCHVLEKIVEPRGCFGLTAKILEAFAANDSVFVENCRRLMALSSAIVTMPHFEFRNICDTKLESIGQRIACYQEFAAQLKSRVSPPFKQAPLEPHPLCGLDFCPTNCHINLMEVSYPKTTPSVGRSFSIRFGRKPSLIGLDPEQGHLNPMSYTQHCITTMAAPSWKCLPAAEGDPQGQGLHDGSFGPASGTLGQEDRGLSFLLKQEDREIQDAYLQLFTKLDVALKEMKQYVTQINRLLSTITEPTSGGSCDASLAEEASSLPLVSEESEMDRSDHGGIKKVCFKVAEEDQEDSGHDTMSYRDSYSECNSNRDSVLSYTSVRSNSSYLGSDEMGSGDELPCDMRIPSDKQDKLHGCLEHLFNQVDSINALLKGPVMSRAFEETKHFPMNHSLQEFKQKEECTIRGRSLIQISIQEDPWNLPNSIKTLVDNIQRYVEDGKNQLLLALLKCTDTELQLRRDAIFCQALVAAVCTFSKQLLAALGYRYNNNGEYEESSRDASRKWLEQVAATGVLLHCQSLLSPATVKEERTMLEDIWVTLSELDNVTFSFKQLDENYVANTNVFYHIEGSRQALKVIFYLDSYHFSKLPSRLEGGASLRLHTALFTKGELQAWGREDHGGRAKATKHTGSQPPARPRHLPSQCWRTWRGCLLQAARPRRICSRTSTRSPWRKFSSITANSGHFTWSGLTCPRMPAPRR

SEQ ID NO: 18365 - protein, 1594 aa, Artificial Sequence
  Synthetic polypeptide
EIPQTCGTAFLHRIRQNVADSVEKGLTEENVKVLFSNIEDILEVHKDFLAALEYCLHPEPQSQHELGNVFLKFKDKFCVYEEYCSNHEKALRLLVELNKIPTVRAFLLSCMLLGGRKTTDIPLEGYLLSPIQRICKYPLLLKELAKRTPGKHPDHPAVQSALQAMKTVCSNINETKRQMEKLEALEQLQSHIEGWEGSNLTDICTQLLLQGTLLKISAGNIQERAFFLFDNLLVYCKRKSRVTGSKKSTKRTKSINGSLYIFRGRINTEVMEVENVEDGTADYHSNGYTVTNGWKIHNTAKNKWFVCMAKTAEEKQKWLDAIIREREQRESLKLGMERDAYVMIAEKGEKLYHMMMNKKVNLIKDRRRKLSTVPKCFLGNEFVAWLLEIGEISKTEEGVNLGQALLENGIIHHVSDKHQFKNEQVMYRFRYDDGTYKARSELEDIMSKGVRLYCRLHSLYTPVIKDRDYHLKTYKSVLPGSKLVDWLLAQGDCQTREEAVALGVGLCNNGFMHHVLEKSEFRDESQYFRFHADEEMEGTSSKNKQLRNDFKLVENILAKRLLILPQEEDYGFDIEEKNKAVVVKSVQRGSLAEVAGLQVGRKIYSINEDLVFLRPFSEVESILNQSFCSRRPLRLLVATKAKEIIKIPDQPDTLCFQIRGAAPPYVYAVGRGSEAMAAGLCAGQCILKVNGSNVMNDGAPEVLEHFQAFRSRREEALGLYQWIYHTHEDAQEARASQEASTEDPSGEQAQEEDQADSAFPLLSLGPRLSLCEDSPMVTLTVDNVHLEHGVVYEYVSTAGVRCHVLEKIVEPRGCFGLTAKILEAFAANDSVFVENCRRLMALSSAIVTMPHFEFRNICDTKLESIGQRIACYQEFAAQLKSRVSPPFKQAPLEPHPLCGLDFCPTNCHINLMEVSYPKTTPSVGRSFSIRFGRKPSLIGLDPEQGHLNPMSYTQHCITTMAAPSWKCLPAAEGDPQGQGLHDGSFGPASGTLGQEDRGLSFLLKQEDREIQDAYLQLFTKLDVALKEMKQYVTQINRLLSTITEPTSGGSCDASLAEEASSLPLVSEESEMDRSDHGGIKKVCFKVAEEDQEDSGHDTMSYRDSYSECNSNRDSVLSYTSVRSNSSYLGSDEMGSGDELPCDMRIPSDKQDKLHGCLEHLFNQVDSINALLKGPVMSRAFEETKHFPMNHSLQEFKQKEECTIRGRSLIQISIQEDPWNLPNSIKTLVDNIQRYVEDGKNQLLLALLKCTDTELQLRRDAIFCQALVAAVCTFSKQLLAALGYRYNNNGEYEESSRDASRKWLEQVAATGVLLHCQSLLSPATVKEERTMLEDIWVTLSELDNVTFSFKQLDENYVANTNVFYHIEGSRQALKVIFYLDSYHFSKLPSRLEGGASLRLHTALFTKVLENVEGLPSPGSQAAEDLQQDINAQSLEKVQQYYRKLRAFYLERSNLPTDASTTAVKIDQLIRPINALDELCRLMKSFVHPKPGAAGSVGAGLIPISSELCYRLGACQMVMCGTGMQRSTLSVSLEQAAILARSHGLLPKCIMQATDIMRKQGPRVEILAKNLRVKDQMPQGAPRLYRLCQPPVDGDL

SEQ ID NO: 18366 - protein, 81 aa, Artificial Sequence
  Synthetic polypeptide
EVLFALHNDSEKFPRHVELHSCIASGRTWPTQWRRASRRRMSRSCSRTSKTSWKFIRISWPPWSIVYTRSRSLSMNLGMFS

SEQ ID NO: 18367 - protein, 83 aa, Artificial Sequence
  Synthetic polypeptide
ISLTRSDGFIRGFCFCFFPHSFLRPPCKKCFSPCTMILRNSPDMWNCIPASHPAERGRLSGEGPHGGECQGPVLEHRRHPGSS

SEQ ID NO: 18368 - protein, 13 aa, Artificial Sequence
  Synthetic polypeptide
DHQRKAHGITGID

SEQ ID NO: 18369 - protein, 116 aa, Artificial Sequence
  Synthetic polypeptide
DHQRKAHGITGIDQVLNVLLTTAMFVGGCVAFILDNTIPGTPEERGIRKWKKGVGKGNKSLDGMESYNLPFGMNIIKKYRCFSYLPISPTFVGYTWKGLRKSDNSRSSDEDSQATG

SEQ ID NO: 18370 - protein, 47 aa, Artificial Sequence
  Synthetic polypeptide
SQQCHSSCLDGSSLTHTIAALCVETSGSTSHHLDILNSEITNGKHTG

SEQ ID NO: 18371 - protein, 15 aa, Artificial Sequence
  Synthetic polypeptide
TVRSPTESTRDNRNR

SEQ ID NO: 18372 - protein, 37 aa, Artificial Sequence
  Synthetic polypeptide
TVRSPTESTRDNRNRSSVERPSHNCYVCRGLCGFYPG

SEQ ID NO: 18373 - protein, 200 aa, Artificial Sequence
  Synthetic polypeptide
FQLLGRLRQENRLDLGGGGCIQWGLPTVSAAGVIGMLSAVVASIIESIGDYYACARLSCAPPPPIHAINRGIFVEGLSCVLDGIFGTGNGSTSSSPNIGVLGITKVGSRRVIQCGAALMLALGMIGKFSALFASLPDPVLGALFCTLFGMITAVGLSNLQFIDLNSSRNLFVLGFSIFFGLVLPSYLRQNPLVTGITGID

SEQ ID NO: 18374 - protein, 303 aa, Artificial Sequence
  Synthetic polypeptide
FQLLGRLRQENRLDLGGGGCIQWGLPTVSAAGVIGMLSAVVASIIESIGDYYACARLSCAPPPPIHAINRGIFVEGLSCVLDGIFGTGNGSTSSSPNIGVLGITKVGSRRVIQCGAALMLALGMIGKFSALFASLPDPVLGALFCTLFGMITAVGLSNLQFIDLNSSRNLFVLGFSIFFGLVLPSYLRQNPLVTGITGIDQVLNVLLTTAMFVGGCVAFILDNTIPGTPEERGIRKWKKGVGKGNKSLDGMESYNLPFGMNIIKKYRCFSYLPISPTFVGYTWKGLRKSDNSRSSDEDSQATG

SEQ ID NO: 18375 - protein, 60 aa, Artificial Sequence
  Synthetic polypeptide
GRRIAWIWEAEVAFSGDCPPCLRPVSSACSVPWSPASSSLLVTTTPVHGCPVPHPPPSTQ

SEQ ID NO: 18376 - protein, 53 aa, Artificial Sequence
  Synthetic polypeptide
RVSVIPATREAEAGESLGSGRRRLHSVGTAHRVCGRCHRHAQCRGRQHHRVYW

SEQ ID NO: 18377 - protein, 81 aa, Artificial Sequence
  Synthetic polypeptide
GRARRDMPVTPALWGGRGRRITRGQEFKTSLANMFSGDCPPCLRPVSSACSVPWSPASSSLLVTTTPVHGCPVPHPPPSTQ

SEQ ID NO: 18378 - protein, 213 aa, Artificial Sequence
  Synthetic polypeptide
PGAAGHACNPSTLGRPRQEDHPRSGVQDQPGQHVQWGLPTVSAAGVIGMLSAVVASIIESIGDYYACARLSCAPPPPIHAINRGIFVEGLSCVLDGIFGTGNGSTSSSPNIGVLGITKVGSRRVIQCGAALMLALGMIGKFSALFASLPDPVLGALFCTLFGMITAVGLSNLQFIDLNSSRNLFVLGFSIFFGLVLPSYLRQNPLVTGITGID

SEQ ID NO: 18379 - protein, 316 aa, Artificial Sequence
  Synthetic polypeptide
PGAAGHACNPSTLGRPRQEDHPRSGVQDQPGQHVQWGLPTVSAAGVIGMLSAVVASIIESIGDYYACARLSCAPPPPIHAINRGIFVEGLSCVLDGIFGTGNGSTSSSPNIGVLGITKVGSRRVIQCGAALMLALGMIGKFSALFASLPDPVLGALFCTLFGMITAVGLSNLQFIDLNSSRNLFVLGFSIFFGLVLPSYLRQNPLVTGITGIDQVLNVLLTTAMFVGGCVAFILDNTIPGTPEERGIRKWKKGVGKGNKSLDGMESYNLPFGMNIIKKYRCFSYLPISPTFVGYTWKGLRKSDNSRSSDEDSQATG

SEQ ID NO: 18380 - protein, 53 aa, Artificial Sequence
  Synthetic polypeptide
PQHFGEAEAGGSPEVRSSRPAWPTCSVGTAHRVCGRCHRHAQCRGRQHHRVYW

SEQ ID NO: 18381 - protein, 203 aa, Artificial Sequence
  Synthetic polypeptide
GRARRDMPVTPALWGGRGRRITRVQWGLPTVSAAGVIGMLSAVVASIIESIGDYYACARLSCAPPPPIHAINRGIFVEGLSCVLDGIFGTGNGSTSSSPNIGVLGITKVGSRRVIQCGAALMLALGMIGKFSALFASLPDPVLGALFCTLFGMITAVGLSNLQFIDLNSSRNLFVLGFSIFFGLVLPSYLRQNPLVTGITGID

SEQ ID NO: 18382 - protein, 306 aa, Artificial Sequence
  Synthetic polypeptide
GRARRDMPVTPALWGGRGRRITRVQWGLPTVSAAGVIGMLSAVVASIIESIGDYYACARLSCAPPPPIHAINRGIFVEGLSCVLDGIFGTGNGSTSSSPNIGVLGITKVGSRRVIQCGAALMLALGMIGKFSALFASLPDPVLGALFCTLFGMITAVGLSNLQFIDLNSSRNLFVLGFSIFFGLVLPSYLRQNPLVTGITGIDQVLNVLLTTAMFVGGCVAFILDNTIPGTPEERGIRKWKKGVGKGNKSLDGMESYNLPFGMNIIKKYRCFSYLPISPTFVGYTWKGLRKSDNSRSSDEDSQATG

SEQ ID NO: 18383 - protein, 51 aa, Artificial Sequence
  Synthetic polypeptide
PGAAGHACNPSTLGRPRQEDHPSSVGTAHRVCGRCHRHAQCRGRQHHRVYW

SEQ ID NO: 18384 - protein, 61 aa, Artificial Sequence
  Synthetic polypeptide
PQHFGEAEAGGSPEFSGDCPPCLRPVSSACSVPWSPASSSLLVTTTPVHGCPVPHPPPSTQ

SEQ ID NO: 18385 - protein, 166 aa, Artificial Sequence
  Synthetic polypeptide
NLILFREEKNQASTVHHPHCPVDSQHYYTYEETGRCDPFRALAPMYYRGSAAAIIVYDITKEETFSTLKNWVKELRQHGPPNIVVAIAGNKCDLIDVREVMERDAKDYADSIHAIFVETSAKNAININELFIEISRRIPSTDANLPSGGKGFKLRRQPSEPKRSCC

SEQ ID NO: 18386 - protein, 20 aa, Artificial Sequence
  Synthetic polypeptide
PISCLSTNVLSRVGCSYNRL

SEQ ID NO: 18387 - protein, 39 aa, Artificial Sequence
  Synthetic polypeptide
YSSEKKKTKRLQCIIHTVQWTVSTTTHMKKQEGVTHFVP

SEQ ID NO: 18388 - protein, 126 aa, Artificial Sequence; identical to SEQ ID NO: 3309
  Synthetic polypeptide

SEQ ID NO: 18389 - protein, 187 aa, Artificial Sequence; identical to SEQ ID NO: 2920
  Synthetic polypeptide

SEQ ID NO: 18390 - protein, 167 aa, Artificial Sequence; identical to SEQ ID NO: 3034
  Synthetic polypeptide

SEQ ID NO: 18391 - protein, 82 aa, Artificial Sequence; identical to SEQ ID NO: 3909
  Synthetic polypeptide

SEQ ID NO: 18392 - protein, 64 aa, Artificial Sequence; identical to SEQ ID NO: 4463
  Synthetic polypeptide

SEQ ID NO: 18393 - protein, 53 aa, Artificial Sequence; identical to SEQ ID NO: 5016
  Synthetic polypeptide

SEQ ID NO: 18394 - protein, 41 aa, Artificial Sequence; identical to SEQ ID NO: 5706
  Synthetic polypeptide

SEQ ID NO: 18395 - protein, 5 aa, Artificial Sequence
  Synthetic polypeptide
NMVRC

SEQ ID NO: 18396 - protein, 98 aa, Artificial Sequence
  Synthetic polypeptide
AQKFEAMDIAAGSHVQQKRLQRVDHPEEVCWPGAVQDHDANRLQRASELLAADHGVHGARVPHPQGLLPAPAPGEDAVCGCFCCFGCGFPVGEDRQTI

SEQ ID NO: 18397 - protein, 455 aa, Artificial Sequence
  Synthetic polypeptide
KKIKIISWAWWCTPLVPATWEAESGGSLEPRSSRLWTSLPAPMFSRSDFSVWTILKKCVGLELSKITMPIAFNEPLSFLQRITEYMEHVYLIHRASCQPQPLERMQSVAAFAVSAVASQWERTGKPFNPLLGETYELIREDLGFRFISEQVSHHPPISAFHSEGLNHDFLFHGSIYPKLKFWGKSVEAEPRGTITLELLKHNEAYTWTNPTCCVHNVIIGKLWIEQYGTVEILNHRTGHKCVLHFKPCGLFGKELHKVEGHIQDKNKKKLFMIYGKWTECLWGIDPVSYESFKKQERRGDHLRKAKLDEDSGKADSDVADDVPVAQETVQVIPGSKLLWRINTRPPNSAQMYNFTSFTVSLNELETGMEKTLPPTDCRLRPDIRGMENGNMDLASQEKERLEEKQREARRERAKEEAEWQTRWFYPGNNPYTGTPDWLYAGDYFERNFSDCPDIY

SEQ ID NO: 18398 - protein, 49 aa, Artificial Sequence
  Synthetic polypeptide
LAGHGGARLWSQLLGRLSQEDPLSPEVRGYGHRCRLPCSAEATSACGPS

SEQ ID NO: 18399 - protein, 116 aa, Artificial Sequence
  Synthetic polypeptide
PLSSVSRLFMPPPVDHLAAGVVPTSPITISQCHVQATLIYLIMAPKHRSTHAAVQLCQWEAGGASFSEKVLGVLFFAIACFLYKPLSESSDGLETCLPSQSSAPDSATDSQLQSSV

SEQ ID NO: 18400 - protein, 89 aa, Artificial Sequence
  Synthetic polypeptide
SLSSRCGSHIPHHHITVPCSSHSYLPNHGPKAPEHSRRRSALPMGSRRRLLQREGAGRPLLCHSLLLIQAPVGVFRWPGNLSAQPVLSP

SEQ ID NO: 18401 - protein, 36 aa, Artificial Sequence
  Synthetic polypeptide
SWPQSTGALTPPFSSANGKPEAPPSARRCWASSSLP

SEQ ID NO: 18402 - protein, 126 aa, Artificial Sequence
  Synthetic polypeptide
DLMVLEASGVCPAVTHTVLLPSEESACFSLHHDCQHLHVLHIPHGGHLGPEHHHRQQADRHGTPGGRAGPSVHGRGRAQHIQHGHRAWQGPGPAARRARPTCSGHRLCGLLAALPRAAPHVLLHLG

SEQ ID NO: 18403 - protein, 208 aa, Artificial Sequence
  Synthetic polypeptide
KRLAFALLSLTPSCCPVKKVPASPSTMIVNTFMSFIFPMVVISVLNTIIANKLTVMVRQAAEQGQVCTVGGEHSTFSMAIEPGRVQALRHGVRVLRAVVIAFVVCWLPYHVRRLMFCYISDEQWTPFLYDFYHYFYMVTNALFYVSSTINPILYNLVSANFRHIFLATLACLCPVWRRRRKRPAFSRKADSVSSNHTLSSNATRETLY

SEQ ID NO: 18404 - protein, 17 aa, Artificial Sequence
  Synthetic polypeptide
LSTPSCPSYSPWWSSRS

SEQ ID NO: 18405 - protein, 138 aa, Artificial Sequence; identical to SEQ ID NO: 3190
  Synthetic polypeptide

SEQ ID NO: 18406 - protein, 24 aa, Artificial Sequence
  Synthetic polypeptide
GSPSPAELSTPSCPSYSPWWSSRS

SEQ ID NO: 18407 - protein, 220 aa, Artificial Sequence; identical to SEQ ID NO: 2802
  Synthetic polypeptide

SEQ ID NO: 18408 - protein, 55 aa, Artificial Sequence; identical to SEQ ID NO: 4901
  Synthetic polypeptide

SEQ ID NO: 18409 - protein, 132 aa, Artificial Sequence; identical to SEQ ID NO: 3249
  Synthetic polypeptide

SEQ ID NO: 18410 - protein, 219 aa, Artificial Sequence; identical to SEQ ID NO: 2803
  Synthetic polypeptide

SEQ ID NO: 18411 - protein, 221 aa, Artificial Sequence; identical to SEQ ID NO: 2797
  Synthetic polypeptide

SEQ ID NO: 18412 - protein, 58 aa, Artificial Sequence; identical to SEQ ID NO: 4788
  Synthetic polypeptide

SEQ ID NO: 18413 - protein, 134 aa, Artificial Sequence; identical to SEQ ID NO: 3237
  Synthetic polypeptide

SEQ ID NO: 18414 - protein, 12 aa, Artificial Sequence
  Synthetic polypeptide
GSSMTSTTTSTW

SEQ ID NO: 18415 - protein, 90 aa, Artificial Sequence
  Synthetic polypeptide
SQHFGRLRFLYDFYHYFYMVTNALFYVSSTINPILYNLVSANFRHIFLATLACLCPVWRRRRKRPAFSRKADSVSSNHTLSSNATRETLY

SEQ ID NO: 18416 - protein, 18 aa, Artificial Sequence
  Synthetic polypeptide
TRWLTPVIPALWEAEVPL

SEQ ID NO: 18417 - protein, 33 aa, Artificial Sequence; identical to SEQ ID NO: 6268
  Synthetic polypeptide

SEQ ID NO: 18418 - protein, 228 aa, Artificial Sequence; identical to SEQ ID NO: 2757
  Synthetic polypeptide

SEQ ID NO: 18419 - protein, 77 aa, Artificial Sequence; identical to SEQ ID NO: 4030
  Synthetic polypeptide

SEQ ID NO: 18420 - protein, 397 aa, Artificial Sequence
  Synthetic polypeptide
GWAKRTDHFFPTQDNSALLQVTISLSKVELSVGESKFFTCTAIGEPESIDWYNPQGEKIISTQRVVVQKEGVRSRLTIYNANIEDAGIYRCQATDAKGQTQEATVVLEIYQKLTFREVVSPQEFKQGEDAEVVCRVSSSPAPAVSWLYHNEEVTTISDNRFAMLANNNLQILNINKSDEGIYRCEGRVEARGEIDFRDIIVIVNVPPAISMPQKSFNATAERGEEMTFSCRASGSPEPAISWFRNGKLIEENEKYILKGSNTELTVRNIINSDGGPYVCRATNKAGEDEKQAFLQVFVQPHIIQLKNETTYENGQVTLVCDAEGEPIPEITWKRAVDGFTFTEGDKSLDGRIEVKGQHGSSSLHIKDVKLSDSGRYDCEAASRIGGHQKSMYLDIES

SEQ ID NO: 18421 - protein, 835 aa, Artificial Sequence
  Synthetic polypeptide
GWAKRTDHFFPTQDNSALLQVTISLSKVELSVGESKFFTCTAIGEPESIDWYNPQGEKIISTQRVVVQKEGVRSRLTIYNANIEDAGIYRCQATDAKGQTQEATVVLEIYQKLTFREVVSPQEFKQGEDAEVVCRVSSSPAPAVSWLYHNEEVTTISDNRFAMLANNNLQILNINKSDEGIYRCEGRVEARGEIDFRDIIVIVNVPPAISMPQKSFNATAERGEEMTFSCRASGSPEPAISWFRNGKLIEENEKYILKGSNTELTVRNIINSDGGPYVCRATNKAGEDEKQAFLQVFVQPHIIQLKNETTYENGQVTLVCDAEGEPIPEITWKRAVDGFTFTEGDKSLDGRIEVKGQHGSSSLHIKDVKLSDSGRYDCEAASRIGGHQKSMYLDIEYAPKFISNQTIYYSWEGNPINISCDVKSNPPASIHWRRDKLVLPAKNTTNLKTYSTGRKMILEIAPTSDNDFGRYNCTATNHIGTRFQEYILALADVPSSPYGVKIIELSQTTAKVSFNKPDSHGGVPIHHYQVDVKEVASEIWKIVRSHGVQTMVVLNNLEPNTTYEIRVAAVNGKGQGDYSKIEIFQTLPVREPSPPSIHGQPSSGKSFKLSITKQDDGGAPILEYIVKYRSKDKEDQWLEKKVQGNKDHIILEHLQWTMGYEVQITAANRLGYSEPTVYEFSMPPKPNIIKDTLFNGLGLGAVIGLGVAALLLILVVTDVSCFFIRQCGLLMCITRRMCGKKSGSSGKSKELEEGKAAYLKDGSKEPIVEMRTEDERVTNHEDGSPVNEPNETTPLTEPEKLPLKEEDGKEALNPETIEIKVSNDIIQSKEDDSKA

SEQ ID NO: 18422 - protein, 10 aa, Artificial Sequence
  Synthetic polypeptide
LCSSSSDNFT

SEQ ID NO: 18423 - protein, 23 aa, Artificial Sequence
  Synthetic polypeptide
LIEAGQKGLTISSQHKITLLFFK

SEQ ID NO: 18424 - protein, 14 aa, Artificial Sequence
  Synthetic polypeptide
DTPAPVLPSSLFFK

SEQ ID NO: 18425 - protein, 36 aa, Artificial Sequence
  Synthetic polypeptide
KCGARSTFPSLLLLQPCEIHLLLCCLLLSSSSDNFT

SEQ ID NO: 18426 - protein, 418 aa, Artificial Sequence
  Synthetic polypeptide
VSSWEISLFKSVEHVAPSPHSSCSNHVRYTCSCVAFFSLLQVTISLSKVELSVGESKFFTCTAIGEPESIDWYNPQGEKIISTQRVVVQKEGVRSRLTIYNANIEDAGIYRCQATDAKGQTQEATVVLEIYQKLTFREVVSPQEFKQGEDAEVVCRVSSSPAPAVSWLYHNEEVTTISDNRFAMLANNNLQILNINKSDEGIYRCEGRVEARGEIDFRDIIVIVNVPPAISMPQKSFNATAERGEEMTFSCRASGSPEPAISWFRNGKLIEENEKYILKGSNTELTVRNIINSDGGPYVCRATNKAGEDEKQAFLQVFVQPHIIQLKNETTYENGQVTLVCDAEGEPIPEITWKRAVDGFTFTEGDKSLDGRIEVKGQHGSSSLHIKDVKLSDSGRYDCEAASRIGGHQKSMYLDIES

SEQ ID NO: 18427 - protein, 856 aa, Artificial Sequence
  Synthetic polypeptide
VSSWEISLFKSVEHVAPSPHSSCSNHVRYTCSCVAFFSLLQVTISLSKVELSVGESKFFTCTAIGEPESIDWYNPQGEKIISTQRVVVQKEGVRSRLTIYNANIEDAGIYRCQATDAKGQTQEATVVLEIYQKLTFREVVSPQEFKQGEDAEVVCRVSSSPAPAVSWLYHNEEVTTISDNRFAMLANNNLQILNINKSDEGIYRCEGRVEARGEIDFRDIIVIVNVPPAISMPQKSFNATAERGEEMTFSCRASGSPEPAISWFRNGKLIEENEKYILKGSNTELTVRNIINSDGGPYVCRATNKAGEDEKQAFLQVFVQPHIIQLKNETTYENGQVTLVCDAEGEPIPEITWKRAVDGFTFTEGDKSLDGRIEVKGQHGSSSLHIKDVKLSDSGRYDCEAASRIGGHQKSMYLDIEYAPKFISNQTIYYSWEGNPINISCDVKSNPPASIHWRRDKLVLPAKNTTNLKTYSTGRKMILEIAPTSDNDFGRYNCTATNHIGTRFQEYILALADVPSSPYGVKIIELSQTTAKVSFNKPDSHGGVPIHHYQVDVKEVASEIWKIVRSHGVQTMVVLNNLEPNTTYEIRVAAVNGKGQGDYSKIEIFQTLPVREPSPPSIHGQPSSGKSFKLSITKQDDGGAPILEYIVKYRSKDKEDQWLEKKVQGNKDHIILEHLQWTMGYEVQITAANRLGYSEPTVYEFSMPPKPNIIKDTLFNGLGLGAVIGLGVAALLLILVVTDVSCFFIRQCGLLMCITRRMCGKKSGSSGKSKELEEGKAAYLKDGSKEPIVEMRTEDERVTNHEDGSPVNEPNETTPLTEPEKLPLKEEDGKEALNPETIEIKVSNDIIQSKEDDSKA

SEQ ID NO: 18428 - protein, 22 aa, Artificial Sequence
  Synthetic polypeptide
CVPVITVLGTEAGESLEPRRQR

SEQ ID NO: 18429 - protein, 148 aa, Artificial Sequence; identical to SEQ ID NO: 3138
  Synthetic polypeptide

SEQ ID NO: 18430 - protein, 207 aa, Artificial Sequence; identical to SEQ ID NO: 2845
  Synthetic polypeptide

SEQ ID NO: 18431 - protein, 225 aa, Artificial Sequence; identical to SEQ ID NO: 2769
  Synthetic polypeptide

SEQ ID NO: 18432 - protein, 22 aa, Artificial Sequence
  Synthetic polypeptide
TQEAEMSCFRKSKTIQMTSWPT

SEQ ID NO: 18433 - protein, 22 aa, Artificial Sequence
  Synthetic polypeptide
EMPFTSRHDSEASPAMWNLKTK

SEQ ID NO: 18434 - protein, 538 aa, Artificial Sequence
  Synthetic polypeptide
GLPSHVELEDKVVEVAEEEEVAEVEEEEADDDEDDEDGDEVEEEAEEPYEEATERTTSIATTTTTTTESVEEVVREVCSEQAETGPCRAMISRWYFDVTEGKCAPFFYGGCGGNRNNFDTEEYCMAVCGSAIPTTAASTPDAVDKYLETPGDENEHAHFQKAKERLEAKHRERMSQVMREWEEAERQAKNLPKADKKAVIQHFQEKVESLEQEAANERQQLVETHMARVEAMLNDRRRLALENYITALQAVPPRPRHVFNMLKKYVRAEQKDRQHTLKHFEHVRMVDPKKAAQIRSQVMTHLRVIYERMNQSLSLLYNVPAVAEEIQDEVDELLQKEQNYSDDVLANMISEPRISYGNDALMPSLTETKTTVELLPVNGEFSLDDLQPWHSFGADSVPANTENEVEPVDARPAADRGLTTRPGSGLTNIKTEEISEVKMDAEFRHDSGYEVHHQKLVFFAEDVGSNKGAIIGLMVGGVVIATVIVITLVMLKKKQYTSIHHGVVEVDAAVTPEERHLSKMQQNGYENPTYKFFEQMQN

SEQ ID NO: 18435 - protein, 350 aa, Artificial Sequence
  Synthetic polypeptide
GLPSHVELEDKVVEVAEEEEVAEVEEEEADDDEDDEDGDEVEEEAEEPYEEATERTTSIATTTTTTTESVEEVVREVCSEQAETGPCRAMISRWYFDVTEGKCAPFFYGGCGGNRNNFDTEEYCMAVCGSAIPTTAASTPDAVDKYLETPGDENEHAHFQKAKERLEAKHRERMSQVMREWEEAERQAKNLPKADKKAVIQHFQEKVESLEQEAANERQQLVETHMARVEAMLNDRRRLALENYITALQAVPPRPRHVFNMLKKYVRAEQKDRQHTLKHFEHVRMVDPKKAAQIRSQVMTHLRVIYERMNQSLSLLYNVPAVAEEIQDEVGAVAHACNSSILGGQGGQMT

SEQ ID NO: 18436 - protein, 539 aa, Artificial Sequence
  Synthetic polypeptide
GLPSHVELEDKVVEVAEEEEVAEVEEEEADDDEDDEDGDEVEEEAEEPYEEATERTTSIATTTTTTTESVEEVVREVCSEQAETGPCRAMISRWYFDVTEGKCAPFFYGGCGGNRNNFDTEEYCMAVCGSAMSQSLLKTTQEPLARDPVKLPTTAASTPDAVDKYLETPGDENEHAHFQKAKERLEAKHRERMSQVMREWEEAERQAKNLPKADKKAVIQHFQEKVESLEQEAANERQQLVETHMARVEAMLNDRRRLALENYITALQAVPPRPRHVFNMLKKYVRAEQKDRQHTLKHFEHVRMVDPKKAAQIRSQVMTHLRVIYERMNQSLSLLYNVPAVAEEIQDEVDELLQKEQNYSDDVLANMISEPRISYGNDALMPSLTETKTTVELLPVNGEFSLDDLQPWHSFGADSVPANTENEGSGLTNIKTEEISEVKMDAEFRHDSGYEVHHQKLVFFAEDVGSNKGAIIGLMVGGVVIATVIVITLVMLKKKQYTSIHHGVVEVDAAVTPEERHLSKMQQNGYENPTYKFFEQMQN

SEQ ID NO: 18437 - protein, 557 aa, Artificial Sequence
  Synthetic polypeptide
GLPSHVELEDKVVEVAEEEEVAEVEEEEADDDEDDEDGDEVEEEAEEPYEEATERTTSIATTTTTTTESVEEVVREVCSEQAETGPCRAMISRWYFDVTEGKCAPFFYGGCGGNRNNFDTEEYCMAVCGSAMSQSLLKTTQEPLARDPVKLPTTAASTPDAVDKYLETPGDENEHAHFQKAKERLEAKHRERMSQVMREWEEAERQAKNLPKADKKAVIQHFQEKVESLEQEAANERQQLVETHMARVEAMLNDRRRLALENYITALQAVPPRPRHVFNMLKKYVRAEQKDRQHTLKHFEHVRMVDPKKAAQIRSQVMTHLRVIYERMNQSLSLLYNVPAVAEEIQDEVDELLQKEQNYSDDVLANMISEPRISYGNDALMPSLTETKTTVELLPVNGEFSLDDLQPWHSFGADSVPANTENEVEPVDARPAADRGLTTRPGSGLTNIKTEEISEVKMDAEFRHDSGYEVHHQKLVFFAEDVGSNKGAIIGLMVGGVVIATVIVITLVMLKKKQYTSIHHGVVEVDAAVTPEERHLSKMQQNGYENPTYKFFEQMQN

SEQ ID NO: 18438 - protein, 482 aa, Artificial Sequence
  Synthetic polypeptide
GLPSHVELEDKVVEVAEEEEVAEVEEEEADDDEDDEDGDEVEEEAEEPYEEATERTTSIATTTTTTTESVEEVVRVPTTAASTPDAVDKYLETPGDENEHAHFQKAKERLEAKHRERMSQVMREWEEAERQAKNLPKADKKAVIQHFQEKVESLEQEAANERQQLVETHMARVEAMLNDRRRLALENYITALQAVPPRPRHVFNMLKKYVRAEQKDRQHTLKHFEHVRMVDPKKAAQIRSQVMTHLRVIYERMNQSLSLLYNVPAVAEEIQDEVDELLQKEQNYSDDVLANMISEPRISYGNDALMPSLTETKTTVELLPVNGEFSLDDLQPWHSFGADSVPANTENEVEPVDARPAADRGLTTRPGSGLTNIKTEEISEVKMDAEFRHDSGYEVHHQKLVFFAEDVGSNKGAIIGLMVGGVVIATVIVITLVMLKKKQYTSIHHGVVEVDAAVTPEERHLSKMQQNGYENPTYKFFEQMQN

SEQ ID NO: 18439 - protein, 177 aa, Artificial Sequence
  Synthetic polypeptide
GLPSHVELEDKVVEVAEEEEVAEVEEEEADDDEDDEDGDEVEEEAEEPYEEATERTTSIATTTTTTTESVEEVVRVSQSLLKTTQEPLARDPVKLPTTAASTPDAVDKYLETPGDENEHAHFQKAKERLEAKHRERMSQVMREWEEAERQAKNLPKADKKAVIQHFQEKVESLEQEA

SEQ ID NO: 18440 - protein, 501 aa, Artificial Sequence
  Synthetic polypeptide
GLPSHVELEDKVVEVAEEEEVAEVEEEEADDDEDDEDGDEVEEEAEEPYEEATERTTSIATTTTTTTESVEEVVRVSQSLLKTTQEPLARDPVKLPTTAASTPDAVDKYLETPGDENEHAHFQKAKERLEAKHRERMSQVMREWEEAERQAKNLPKADKKAVIQHFQEKVESLEQEAANERQQLVETHMARVEAMLNDRRRLALENYITALQAVPPRPRHVFNMLKKYVRAEQKDRQHTLKHFEHVRMVDPKKAAQIRSQVMTHLRVIYERMNQSLSLLYNVPAVAEEIQDEVDELLQKEQNYSDDVLANMISEPRISYGNDALMPSLTETKTTVELLPVNGEFSLDDLQPWHSFGADSVPANTENEVEPVDARPAADRGLTTRPGSGLTNIKTEEISEVKMDAEFRHDSGYEVHHQKLVFFAEDVGSNKGAIIGLMVGGVVIATVIVITLVMLKKKQYTSIHHGVVEVDAAVTPEERHLSKMQQNGYENPTYKFFEQMQN

SEQ ID NO: 18441 - protein, 537 aa, Artificial Sequence
  Synthetic polypeptide
NMVPDICEDKVVEVAEEEEVAEVEEEEADDDEDDEDGDEVEEEAEEPYEEATERTTSIATTTTTTTESVEEVVREVCSEQAETGPCRAMISRWYFDVTEGKCAPFFYGGCGGNRNNFDTEEYCMAVCGSAIPTTAASTPDAVDKYLETPGDENEHAHFQKAKERLEAKHRERMSQVMREWEEAERQAKNLPKADKKAVIQHFQEKVESLEQEAANERQQLVETHMARVEAMLNDRRRLALENYITALQAVPPRPRHVFNMLKKYVRAEQKDRQHTLKHFEHVRMVDPKKAAQIRSQVMTHLRVIYERMNQSLSLLYNVPAVAEEIQDEVDELLQKEQNYSDDVLANMISEPRISYGNDALMPSLTETKTTVELLPVNGEFSLDDLQPWHSFGADSVPANTENEVEPVDARPAADRGLTTRPGSGLTNIKTEEISEVKMDAEFRHDSGYEVHHQKLVFFAEDVGSNKGAIIGLMVGGVVIATVIVITLVMLKKKQYTSIHHGVVEVDAAVTPEERHLSKMQQNGYENPTYKFFEQMQN

SEQ ID NO: 18442 - protein, 349 aa, Artificial Sequence
  Synthetic polypeptide
NMVPDICEDKVVEVAEEEEVAEVEEEEADDDEDDEDGDEVEEEAEEPYEEATERTTSIATTTTTTTESVEEVVREVCSEQAETGPCRAMISRWYFDVTEGKCAPFFYGGCGGNRNNFDTEEYCMAVCGSAIPTTAASTPDAVDKYLETPGDENEHAHFQKAKERLEAKHRERMSQVMREWEEAERQAKNLPKADKKAVIQHFQEKVESLEQEAANERQQLVETHMARVEAMLNDRRRLALENYITALQAVPPRPRHVFNMLKKYVRAEQKDRQHTLKHFEHVRMVDPKKAAQIRSQVMTHLRVIYERMNQSLSLLYNVPAVAEEIQDEVGAVAHACNSSILGGQGGQMT

SEQ ID NO: 18443 - protein, 538 aa, Artificial Sequence
  Synthetic polypeptide
NMVPDICEDKVVEVAEEEEVAEVEEEEADDDEDDEDGDEVEEEAEEPYEEATERTTSIATTTTTTTESVEEVVREVCSEQAETGPCRAMISRWYFDVTEGKCAPFFYGGCGGNRNNFDTEEYCMAVCGSAMSQSLLKTTQEPLARDPVKLPTTAASTPDAVDKYLETPGDENEHAHFQKAKERLEAKHRERMSQVMREWEEAERQAKNLPKADKKAVIQHFQEKVESLEQEAANERQQLVETHMARVEAMLNDRRRLALENYITALQAVPPRPRHVFNMLKKYVRAEQKDRQHTLKHFEHVRMVDPKKAAQIRSQVMTHLRVIYERMNQSLSLLYNVPAVAEEIQDEVDELLQKEQNYSDDVLANMISEPRISYGNDALMPSLTETKTTVELLPVNGEFSLDDLQPWHSFGADSVPANTENEGSGLTNIKTEEISEVKMDAEFRHDSGYEVHHQKLVFFAEDVGSNKGAIIGLMVGGVVIATVIVITLVMLKKKQYTSIHHGVVEVDAAVTPEERHLSKMQQNGYENPTYKFFEQMQN

SEQ ID NO: 18444 - protein, 556 aa, Artificial Sequence
  Synthetic polypeptide
NMVPDICEDKVVEVAEEEEVAEVEEEEADDDEDDEDGDEVEEEAEEPYEEATERTTSIATTTTTTTESVEEVVREVCSEQAETGPCRAMISRWYFDVTEGKCAPFFYGGCGGNRNNFDTEEYCMAVCGSAMSQSLLKTTQEPLARDPVKLPTTAASTPDAVDKYLETPGDENEHAHFQKAKERLEAKHRERMSQVMREWEEAERQAKNLPKADKKAVIQHFQEKVESLEQEAANERQQLVETHMARVEAMLNDRRRLALENYITALQAVPPRPRHVFNMLKKYVRAEQKDRQHTLKHFEHVRMVDPKKAAQIRSQVMTHLRVIYERMNQSLSLLYNVPAVAEEIQDEVDELLQKEQNYSDDVLANMISEPRISYGNDALMPSLTETKTTVELLPVNGEFSLDDLQPWHSFGADSVPANTENEVEPVDARPAADRGLTTRPGSGLTNIKTEEISEVKMDAEFRHDSGYEVHHQKLVFFAEDVGSNKGAIIGLMVGGVVIATVIVITLVMLKKKQYTSIHHGVVEVDAAVTPEERHLSKMQQNGYENPTYKFFEQMQN

SEQ ID NO: 18445 - protein, 481 aa, Artificial Sequence
  Synthetic polypeptide
NMVPDICEDKVVEVAEEEEVAEVEEEEADDDEDDEDGDEVEEEAEEPYEEATERTTSIATTTTTTTESVEEVVRVPTTAASTPDAVDKYLETPGDENEHAHFQKAKERLEAKHRERMSQVMREWEEAERQAKNLPKADKKAVIQHFQEKVESLEQEAANERQQLVETHMARVEAMLNDRRRLALENYITALQAVPPRPRHVFNMLKKYVRAEQKDRQHTLKHFEHVRMVDPKKAAQIRSQVMTHLRVIYERMNQSLSLLYNVPAVAEEIQDEVDELLQKEQNYSDDVLANMISEPRISYGNDALMPSLTETKTTVELLPVNGEFSLDDLQPWHSFGADSVPANTENEVEPVDARPAADRGLTTRPGSGLTNIKTEEISEVKMDAEFRHDSGYEVHHQKLVFFAEDVGSNKGAIIGLMVGGVVIATVIVITLVMLKKKQYTSIHHGVVEVDAAVTPEERHLSKMQQNGYENPTYKFFEQMQN

SEQ ID NO: 18446 - protein, 176 aa, Artificial Sequence
  Synthetic polypeptide
NMVPDICEDKVVEVAEEEEVAEVEEEEADDDEDDEDGDEVEEEAEEPYEEATERTTSIATTTTTTTESVEEVVRVSQSLLKTTQEPLARDPVKLPTTAASTPDAVDKYLETPGDENEHAHFQKAKERLEAKHRERMSQVMREWEEAERQAKNLPKADKKAVIQHFQEKVESLEQEA

SEQ ID NO: 18447 - protein, 500 aa, Artificial Sequence
  Synthetic polypeptide
NMVPDICEDKVVEVAEEEEVAEVEEEEADDDEDDEDGDEVEEEAEEPYEEATERTTSIATTTTTTTESVEEVVRVSQSLLKTTQEPLARDPVKLPTTAASTPDAVDKYLETPGDENEHAHFQKAKERLEAKHRERMSQVMREWEEAERQAKNLPKADKKAVIQHFQEKVESLEQEAANERQQLVETHMARVEAMLNDRRRLALENYITALQAVPPRPRHVFNMLKKYVRAEQKDRQHTLKHFEHVRMVDPKKAAQIRSQVMTHLRVIYERMNQSLSLLYNVPAVAEEIQDEVDELLQKEQNYSDDVLANMISEPRISYGNDALMPSLTETKTTVELLPVNGEFSLDDLQPWHSFGADSVPANTENEVEPVDARPAADRGLTTRPGSGLTNIKTEEISEVKMDAEFRHDSGYEVHHQKLVFFAEDVGSNKGAIIGLMVGGVVIATVIVITLVMLKKKQYTSIHHGVVEVDAAVTPEERHLSKMQQNGYENPTYKFFEQMQN

SEQ ID NO: 18448 - protein, 10 aa, Artificial Sequence
  Synthetic polypeptide
TWYLTFVKTK

SEQ ID NO: 18449 - protein, 639 aa, Artificial Sequence
  Synthetic polypeptide
LQCHFLVGEFVSDALLVPDKCKFLHQERMDVCETHLHWHTVAKETCSEKSTNLHDYGMLLPCGIDKFRGVEFVCCPLAEESDNVDSADAEEDDSDVWWGGADTDYADGSEDKVVEVAEEEEVAEVEEEEADDDEDDEDGDEVEEEAEEPYEEATERTTSIATTTTTTTESVEEVVREVCSEQAETGPCRAMISRWYFDVTEGKCAPFFYGGCGGNRNNFDTEEYCMAVCGSAIPTTAASTPDAVDKYLETPGDENEHAHFQKAKERLEAKHRERMSQVMREWEEAERQAKNLPKADKKAVIQHFQEKVESLEQEAANERQQLVETHMARVEAMLNDRRRLALENYITALQAVPPRPRHVFNMLKKYVRAEQKDRQHTLKHFEHVRMVDPKKAAQIRSQVMTHLRVIYERMNQSLSLLYNVPAVAEEIQDEVDELLQKEQNYSDDVLANMISEPRISYGNDALMPSLTETKTTVELLPVNGEFSLDDLQPWHSFGADSVPANTENEVEPVDARPAADRGLTTRPGSGLTNIKTEEISEVKMDAEFRHDSGYEVHHQKLVFFAEDVGSNKGAIIGLMVGGVVIATVIVITLVMLKKKQYTSIHHGVVEVDAAVTPEERHLSKMQQNGYENPTYKFFEQMQN

SEQ ID NO: 18450 - protein, 451 aa, Artificial Sequence
  Synthetic polypeptide
LQCHFLVGEFVSDALLVPDKCKFLHQERMDVCETHLHWHTVAKETCSEKSTNLHDYGMLLPCGIDKFRGVEFVCCPLAEESDNVDSADAEEDDSDVWWGGADTDYADGSEDKVVEVAEEEEVAEVEEEEADDDEDDEDGDEVEEEAEEPYEEATERTTSIATTTTTTTESVEEVVREVCSEQAETGPCRAMISRWYFDVTEGKCAPFFYGGCGGNRNNFDTEEYCMAVCGSAIPTTAASTPDAVDKYLETPGDENEHAHFQKAKERLEAKHRERMSQVMREWEEAERQAKNLPKADKKAVIQHFQEKVESLEQEAANERQQLVETHMARVEAMLNDRRRLALENYITALQAVPPRPRHVFNMLKKYVRAEQKDRQHTLKHFEHVRMVDPKKAAQIRSQVMTHLRVIYERMNQSLSLLYNVPAVAEEIQDEVGAVAHACNSSILGGQGGQMT

SEQ ID NO: 18451 - protein, 640 aa, Artificial Sequence
  Synthetic polypeptide
LQCHFLVGEFVSDALLVPDKCKFLHQERMDVCETHLHWHTVAKETCSEKSTNLHDYGMLLPCGIDKFRGVEFVCCPLAEESDNVDSADAEEDDSDVWWGGADTDYADGSEDKVVEVAEEEEVAEVEEEEADDDEDDEDGDEVEEEAEEPYEEATERTTSIATTTTTTTESVEEVVREVCSEQAETGPCRAMISRWYFDVTEGKCAPFFYGGCGGNRNNFDTEEYCMAVCGSAMSQSLLKTTQEPLARDPVKLPTTAASTPDAVDKYLETPGDENEHAHFQKAKERLEAKHRERMSQVMREWEEAERQAKNLPKADKKAVIQHFQEKVESLEQEAANERQQLVETHMARVEAMLNDRRRLALENYITALQAVPPRPRHVFNMLKKYVRAEQKDRQHTLKHFEHVRMVDPKKAAQIRSQVMTHLRVIYERMNQSLSLLYNVPAVAEEIQDEVDELLQKEQNYSDDVLANMISEPRISYGNDALMPSLTETKTTVELLPVNGEFSLDDLQPWHSFGADSVPANTENEGSGLTNIKTEEISEVKMDAEFRHDSGYEVHHQKLVFFAEDVGSNKGAIIGLMVGGVVIATVIVITLVMLKKKQYTSIHHGVVEVDAAVTPEERHLSKMQQNGYENPTYKFFEQMQN

SEQ ID NO: 18452 - protein, 658 aa, Artificial Sequence
  Synthetic polypeptide
LQCHFLVGEFVSDALLVPDKCKFLHQERMDVCETHLHWHTVAKETCSEKSTNLHDYGMLLPCGIDKFRGVEFVCCPLAEESDNVDSADAEEDDSDVWWGGADTDYADGSEDKVVEVAEEEEVAEVEEEEADDDEDDEDGDEVEEEAEEPYEEATERTTSIATTTTTTTESVEEVVREVCSEQAETGPCRAMISRWYFDVTEGKCAPFFYGGCGGNRNNFDTEEYCMAVCGSAMSQSLLKTTQEPLARDPVKLPTTAASTPDAVDKYLETPGDENEHAHFQKAKERLEAKHRERMSQVMREWEEAERQAKNLPKADKKAVIQHFQEKVESLEQEAANERQQLVETHMARVEAMLNDRRRLALENYITALQAVPPRPRHVFNMLKKYVRAEQKDRQHTLKHFEHVRMVDPKKAAQIRSQVMTHLRVIYERMNQSLSLLYNVPAVAEEIQDEVDELLQKEQNYSDDVLANMISEPRISYGNDALMPSLTETKTTVELLPVNGEFSLDDLQPWHSFGADSVPANTENEVEPVDARPAADRGLTTRPGSGLTNIKTEEISEVKMDAEFRHDSGYEVHHQKLVFFAEDVGSNKGAIIGLMVGGVVIATVIVITLVMLKKKQYTSIHHGVVEVDAAVTPEERHLSKMQQNGYENPTYKFFEQMQN

SEQ ID NO: 18453 - protein, 583 aa, Artificial Sequence
  Synthetic polypeptide
LQCHFLVGEFVSDALLVPDKCKFLHQERMDVCETHLHWHTVAKETCSEKSTNLHDYGMLLPCGIDKFRGVEFVCCPLAEESDNVDSADAEEDDSDVWWGGADTDYADGSEDKVVEVAEEEEVAEVEEEEADDDEDDEDGDEVEEEAEEPYEEATERTTSIATTTTTTTESVEEVVRVPTTAASTPDAVDKYLETPGDENEHAHFQKAKERLEAKHRERMSQVMREWEEAERQAKNLPKADKKAVIQHFQEKVESLEQEAANERQQLVETHMARVEAMLNDRRRLALENYITALQAVPPRPRHVFNMLKKYVRAEQKDRQHTLKHFEHVRMVDPKKAAQIRSQVMTHLRVIYERMNQSLSLLYNVPAVAEEIQDEVDELLQKEQNYSDDVLANMISEPRISYGNDALMPSLTETKTTVELLPVNGEFSLDDLQPWHSFGADSVPANTENEVEPVDARPAADRGLTTRPGSGLTNIKTEEISEVKMDAEFRHDSGYEVHHQKLVFFAEDVGSNKGAIIGLMVGGVVIATVIVITLVMLKKKQYTSIHHGVVEVDAAVTPEERHLSKMQQNGYENPTYKFFEQMQN

SEQ ID NO: 18454 - protein, 602 aa, Artificial Sequence
  Synthetic polypeptide
LQCHFLVGEFVSDALLVPDKCKFLHQERMDVCETHLHWHTVAKETCSEKSTNLHDYGMLLPCGIDKFRGVEFVCCPLAEESDNVDSADAEEDDSDVWWGGADTDYADGSEDKVVEVAEEEEVAEVEEEEADDDEDDEDGDEVEEEAEEPYEEATERTTSIATTTTTTTESVEEVVRVSQSLLKTTQEPLARDPVKLPTTAASTPDAVDKYLETPGDENEHAHFQKAKERLEAKHRERMSQVMREWEEAERQAKNLPKADKKAVIQHFQEKVESLEQEAANERQQLVETHMARVEAMLNDRRRLALENYITALQAVPPRPRHVFNMLKKYVRAEQKDRQHTLKHFEHVRMVDPKKAAQIRSQVMTHLRVIYERMNQSLSLLYNVPAVAEEIQDEVDELLQKEQNYSDDVLANMISEPRISYGNDALMPSLTETKTTVELLPVNGEFSLDDLQPWHSFGADSVPANTENEVEPVDARPAADRGLTTRPGSGLTNIKTEEISEVKMDAEFRHDSGYEVHHQKLVFFAEDVGSNKGAIIGLMVGGVVIATVIVITLVMLKKKQYTSIHHGVVEVDAAVTPEERHLSKMQQNGYENPTYKFFEQMQN

SEQ ID NO: 18455 - protein, 18 aa, Artificial Sequence
  Synthetic polypeptide
WHHGISAVALASVSLLSW

SEQ ID NO: 18456 - protein, 29 aa, Artificial Sequence
  Synthetic polypeptide
GLPSHAELYPLMVMLACWLNPRLPCSVAD

SEQ ID NO: 18457 - protein, 47 aa, Artificial Sequence
  Synthetic polypeptide
SLYKGLFPPFAWHFFFLPPCEEGRVCLPVYPNCKVPEASPAMLNCTH

SEQ ID NO: 18458 - protein, 733 aa, Artificial Sequence
  Synthetic polypeptide
TVPTDGNAGLLAEPQIAMFCGRLNMHMNVQNGKWDSDPSGTKTCIDTKEGILQYCQEVYPELQITNVVEANQPVTIQNWCKRGRKQCKTHPHFVIPYRCLVGEFVSDALLVPDKCKFLHQERMDVCETHLHWHTVAKETCSEKSTNLHDYGMLLPCGIDKFRGVEFVCCPLAEESDNVDSADAEEDDSDVWWGGADTDYADGSEDKVVEVAEEEEVAEVEEEEADDDEDDEDGDEVEEEAEEPYEEATERTTSIATTTTTTTESVEEVVREVCSEQAETGPCRAMISRWYFDVTEGKCAPFFYGGCGGNRNNFDTEEYCMAVCGSAIPTTAASTPDAVDKYLETPGDENEHAHFQKAKERLEAKHRERMSQVMREWEEAERQAKNLPKADKKAVIQHFQEKVESLEQEAANERQQLVETHMARVEAMLNDRRRLALENYITALQAVPPRPRHVFNMLKKYVRAEQKDRQHTLKHFEHVRMVDPKKAAQIRSQVMTHLRVIYERMNQSLSLLYNVPAVAEEIQDEVDELLQKEQNYSDDVLANMISEPRISYGNDALMPSLTETKTTVELLPVNGEFSLDDLQPWHSFGADSVPANTENEVEPVDARPAADRGLTTRPGSGLTNIKTEEISEVKMDAEFRHDSGYEVHHQKLVFFAEDVGSNKGAIIGLMVGGVVIATVIVITLVMLKKKQYTSIHHGVVEVDAAVTPEERHLSKMQQNGYENPTYKFFEQMQN

SEQ ID NO: 18459 - protein, 734 aa, Artificial Sequence
  Synthetic polypeptide
TVPTDGNAGLLAEPQIAMFCGRLNMHMNVQNGKWDSDPSGTKTCIDTKEGILQYCQEVYPELQITNVVEANQPVTIQNWCKRGRKQCKTHPHFVIPYRCLVGEFVSDALLVPDKCKFLHQERMDVCETHLHWHTVAKETCSEKSTNLHDYGMLLPCGIDKFRGVEFVCCPLAEESDNVDSADAEEDDSDVWWGGADTDYADGSEDKVVEVAEEEEVAEVEEEEADDDEDDEDGDEVEEEAEEPYEEATERTTSIATTTTTTTESVEEVVREVCSEQAETGPCRAMISRWYFDVTEGKCAPFFYGGCGGNRNNFDTEEYCMAVCGSAMSQSLLKTTQEPLARDPVKLPTTAASTPDAVDKYLETPGDENEHAHFQKAKERLEAKHRERMSQVMREWEEAERQAKNLPKADKKAVIQHFQEKVESLEQEAANERQQLVETHMARVEAMLNDRRRLALENYITALQAVPPRPRHVFNMLKKYVRAEQKDRQHTLKHFEHVRMVDPKKAAQIRSQVMTHLRVIYERMNQSLSLLYNVPAVAEEIQDEVDELLQKEQNYSDDVLANMISEPRISYGNDALMPSLTETKTTVELLPVNGEFSLDDLQPWHSFGADSVPANTENEGSGLTNIKTEEISEVKMDAEFRHDSGYEVHHQKLVFFAEDVGSNKGAIIGLMVGGVVIATVIVITLVMLKKKQYTSIHHGVVEVDAAVTPEERHLSKMQQNGYENPTYKFFEQMQN

SEQ ID NO: 18460 - protein, 752 aa, Artificial Sequence
  Synthetic polypeptide
TVPTDGNAGLLAEPQIAMFCGRLNMHMNVQNGKWDSDPSGTKTCIDTKEGILQYCQEVYPELQITNVVEANQPVTIQNWCKRGRKQCKTHPHFVIPYRCLVGEFVSDALLVPDKCKFLHQERMDVCETHLHWHTVAKETCSEKSTNLHDYGMLLPCGIDKFRGVEFVCCPLAEESDNVDSADAEEDDSDVWWGGADTDYADGSEDKVVEVAEEEEVAEVEEEEADDDEDDEDGDEVEEEAEEPYEEATERTTSIATTTTTTTESVEEVVREVCSEQAETGPCRAMISRWYFDVTEGKCAPFFYGGCGGNRNNFDTEEYCMAVCGSAMSQSLLKTTQEPLARDPVKLPTTAASTPDAVDKYLETPGDENEHAHFQKAKERLEAKHRERMSQVMREWEEAERQAKNLPKADKKAVIQHFQEKVESLEQEAANERQQLVETHMARVEAMLNDRRRLALENYITALQAVPPRPRHVFNMLKKYVRAEQKDRQHTLKHFEHVRMVDPKKAAQIRSQVMTHLRVIYERMNQSLSLLYNVPAVAEEIQDEVDELLQKEQNYSDDVLANMISEPRISYGNDALMPSLTETKTTVELLPVNGEFSLDDLQPWHSFGADSVPANTENEVEPVDARPAADRGLTTRPGSGLTNIKTEEISEVKMDAEFRHDSGYEVHHQKLVFFAEDVGSNKGAIIGLMVGGVVIATVIVITLVMLKKKQYTSIHHGVVEVDAAVTPEERHLSKMQQNGYENPTYKFFEQMQN

SEQ ID NO: 18461 - protein, 677 aa, Artificial Sequence
  Synthetic polypeptide
TVPTDGNAGLLAEPQIAMFCGRLNMHMNVQNGKWDSDPSGTKTCIDTKEGILQYCQEVYPELQITNVVEANQPVTIQNWCKRGRKQCKTHPHFVIPYRCLVGEFVSDALLVPDKCKFLHQERMDVCETHLHWHTVAKETCSEKSTNLHDYGMLLPCGIDKFRGVEFVCCPLAEESDNVDSADAEEDDSDVWWGGADTDYADGSEDKVVEVAEEEEVAEVEEEEADDDEDDEDGDEVEEEAEEPYEEATERTTSIATTTTTTTESVEEVVRVPTTAASTPDAVDKYLETPGDENEHAHFQKAKERLEAKHRERMSQVMREWEEAERQAKNLPKADKKAVIQHFQEKVESLEQEAANERQQLVETHMARVEAMLNDRRRLALENYITALQAVPPRPRHVFNMLKKYVRAEQKDRQHTLKHFEHVRMVDPKKAAQIRSQVMTHLRVIYERMNQSLSLLYNVPAVAEEIQDEVDELLQKEQNYSDDVLANMISEPRISYGNDALMPSLTETKTTVELLPVNGEFSLDDLQPWHSFGADSVPANTENEVEPVDARPAADRGLTTRPGSGLTNIKTEEISEVKMDAEFRHDSGYEVHHQKLVFFAEDVGSNKGAIIGLMVGGVVIATVIVITLVMLKKKQYTSIHHGVVEVDAAVTPEERHLSKMQQNGYENPTYKFFEQMQN

SEQ ID NO: 18462 - protein, 696 aa, Artificial Sequence
  Synthetic polypeptide
TVPTDGNAGLLAEPQIAMFCGRLNMHMNVQNGKWDSDPSGTKTCIDTKEGILQYCQEVYPELQITNVVEANQPVTIQNWCKRGRKQCKTHPHFVIPYRCLVGEFVSDALLVPDKCKFLHQERMDVCETHLHWHTVAKETCSEKSTNLHDYGMLLPCGIDKFRGVEFVCCPLAEESDNVDSADAEEDDSDVWWGGADTDYADGSEDKVVEVAEEEEVAEVEEEEADDDEDDEDGDEVEEEAEEPYEEATERTTSIATTTTTTTESVEEVVRVSQSLLKTTQEPLARDPVKLPTTAASTPDAVDKYLETPGDENEHAHFQKAKERLEAKHRERMSQVMREWEEAERQAKNLPKADKKAVIQHFQEKVESLEQEAANERQQLVETHMARVEAMLNDRRRLALENYITALQAVPPRPRHVFNMLKKYVRAEQKDRQHTLKHFEHVRMVDPKKAAQIRSQVMTHLRVIYERMNQSLSLLYNVPAVAEEIQDEVDELLQKEQNYSDDVLANMISEPRISYGNDALMPSLTETKTTVELLPVNGEFSLDDLQPWHSFGADSVPANTENEVEPVDARPAADRGLTTRPGSGLTNIKTEEISEVKMDAEFRHDSGYEVHHQKLVFFAEDVGSNKGAIIGLMVGGVVIATVIVITLVMLKKKQYTSIHHGVVEVDAAVTPEERHLSKMQQNGYENPTYKFFEQMQN

SEQ ID NO: 18463 - protein, 749 aa, Artificial Sequence
  Synthetic polypeptide
GRARWLTPVIPALRETEVPTDGNAGLLAEPQIAMFCGRLNMHMNVQNGKWDSDPSGTKTCIDTKEGILQYCQEVYPELQITNVVEANQPVTIQNWCKRGRKQCKTHPHFVIPYRCLVGEFVSDALLVPDKCKFLHQERMDVCETHLHWHTVAKETCSEKSTNLHDYGMLLPCGIDKFRGVEFVCCPLAEESDNVDSADAEEDDSDVWWGGADTDYADGSEDKVVEVAEEEEVAEVEEEEADDDEDDEDGDEVEEEAEEPYEEATERTTSIATTTTTTTESVEEVVREVCSEQAETGPCRAMISRWYFDVTEGKCAPFFYGGCGGNRNNFDTEEYCMAVCGSAIPTTAASTPDAVDKYLETPGDENEHAHFQKAKERLEAKHRERMSQVMREWEEAERQAKNLPKADKKAVIQHFQEKVESLEQEAANERQQLVETHMARVEAMLNDRRRLALENYITALQAVPPRPRHVFNMLKKYVRAEQKDRQHTLKHFEHVRMVDPKKAAQIRSQVMTHLRVIYERMNQSLSLLYNVPAVAEEIQDEVDELLQKEQNYSDDVLANMISEPRISYGNDALMPSLTETKTTVELLPVNGEFSLDDLQPWHSFGADSVPANTENEVEPVDARPAADRGLTTRPGSGLTNIKTEEISEVKMDAEFRHDSGYEVHHQKLVFFAEDVGSNKGAIIGLMVGGVVIATVIVITLVMLKKKQYTSIHHGVVEVDAAVTPEERHLSKMQQNGYENPTYKFFEQMQN

SEQ ID NO: 18464 - protein, 750 aa, Artificial Sequence
  Synthetic polypeptide
GRARWLTPVIPALRETEVPTDGNAGLLAEPQIAMFCGRLNMHMNVQNGKWDSDPSGTKTCIDTKEGILQYCQEVYPELQITNVVEANQPVTIQNWCKRGRKQCKTHPHFVIPYRCLVGEFVSDALLVPDKCKFLHQERMDVCETHLHWHTVAKETCSEKSTNLHDYGMLLPCGIDKFRGVEFVCCPLAEESDNVDSADAEEDDSDVWWGGADTDYADGSEDKVVEVAEEEEVAEVEEEEADDDEDDEDGDEVEEEAEEPYEEATERTTSIATTTTTTTESVEEVVREVCSEQAETGPCRAMISRWYFDVTEGKCAPFFYGGCGGNRNNFDTEEYCMAVCGSAMSQSLLKTTQEPLARDPVKLPTTAASTPDAVDKYLETPGDENEHAHFQKAKERLEAKHRERMSQVMREWEEAERQAKNLPKADKKAVIQHFQEKVESLEQEAANERQQLVETHMARVEAMLNDRRRLALENYITALQAVPPRPRHVFNMLKKYVRAEQKDRQHTLKHFEHVRMVDPKKAAQIRSQVMTHLRVIYERMNQSLSLLYNVPAVAEEIQDEVDELLQKEQNYSDDVLANMISEPRISYGNDALMPSLTETKTTVELLPVNGEFSLDDLQPWHSFGADSVPANTENEGSGLTNIKTEEISEVKMDAEFRHDSGYEVHHQKLVFFAEDVGSNKGAIIGLMVGGVVIATVIVITLVMLKKKQYTSIHHGVVEVDAAVTPEERHLSKMQQNGYENPTYKFFEQMQN

SEQ ID NO: 18465 - protein, 768 aa, Artificial Sequence
  Synthetic polypeptide
GRARWLTPVIPALRETEVPTDGNAGLLAEPQIAMFCGRLNMHMNVQNGKWDSDPSGTKTCIDTKEGILQYCQEVYPELQITNVVEANQPVTIQNWCKRGRKQCKTHPHFVIPYRCLVGEFVSDALLVPDKCKFLHQERMDVCETHLHWHTVAKETCSEKSTNLHDYGMLLPCGIDKFRGVEFVCCPLAEESDNVDSADAEEDDSDVWWGGADTDYADGSEDKVVEVAEEEEVAEVEEEEADDDEDDEDGDEVEEEAEEPYEEATERTTSIATTTTTTTESVEEVVREVCSEQAETGPCRAMISRWYFDVTEGKCAPFFYGGCGGNRNNFDTEEYCMAVCGSAMSQSLLKTTQEPLARDPVKLPTTAASTPDAVDKYLETPGDENEHAHFQKAKERLEAKHRERMSQVMREWEEAERQAKNLPKADKKAVIQHFQEKVESLEQEAANERQQLVETHMARVEAMLNDRRRLALENYITALQAVPPRPRHVFNMLKKYVRAEQKDRQHTLKHFEHVRMVDPKKAAQIRSQVMTHLRVIYERMNQSLSLLYNVPAVAEEIQDEVDELLQKEQNYSDDVLANMISEPRISYGNDALMPSLTETKTTVELLPVNGEFSLDDLQPWHSFGADSVPANTENEVEPVDARPAADRGLTTRPGSGLTNIKTEEISEVKMDAEFRHDSGYEVHHQKLVFFAEDVGSNKGAIIGLMVGGVVIATVIVITLVMLKKKQYTSIHHGVVEVDAAVTPEERHLSKMQQNGYENPTYKFFEQMQN

SEQ ID NO: 18466 - protein, 693 aa, Artificial Sequence
  Synthetic polypeptide
GRARWLTPVIPALRETEVPTDGNAGLLAEPQIAMFCGRLNMHMNVQNGKWDSDPSGTKTCIDTKEGILQYCQEVYPELQITNVVEANQPVTIQNWCKRGRKQCKTHPHFVIPYRCLVGEFVSDALLVPDKCKFLHQERMDVCETHLHWHTVAKETCSEKSTNLHDYGMLLPCGIDKFRGVEFVCCPLAEESDNVDSADAEEDDSDVWWGGADTDYADGSEDKVVEVAEEEEVAEVEEEEADDDEDDEDGDEVEEEAEEPYEEATERTTSIATTTTTTTESVEEVVRVPTTAASTPDAVDKYLETPGDENEHAHFQKAKERLEAKHRERMSQVMREWEEAERQAKNLPKADKKAVIQHFQEKVESLEQEAANERQQLVETHMARVEAMLNDRRRLALENYITALQAVPPRPRHVFNMLKKYVRAEQKDRQHTLKHFEHVRMVDPKKAAQIRSQVMTHLRVIYERMNQSLSLLYNVPAVAEEIQDEVDELLQKEQNYSDDVLANMISEPRISYGNDALMPSLTETKTTVELLPVNGEFSLDDLQPWHSFGADSVPANTENEVEPVDARPAADRGLTTRPGSGLTNIKTEEISEVKMDAEFRHDSGYEVHHQKLVFFAEDVGSNKGAIIGLMVGGVVIATVIVITLVMLKKKQYTSIHHGVVEVDAAVTPEERHLSKMQQNGYENPTYKFFEQMQN

SEQ ID NO: 18467 - protein, 712 aa, Artificial Sequence
  Synthetic polypeptide
GRARWLTPVIPALRETEVPTDGNAGLLAEPQIAMFCGRLNMHMNVQNGKWDSDPSGTKTCIDTKEGILQYCQEVYPELQITNVVEANQPVTIQNWCKRGRKQCKTHPHFVIPYRCLVGEFVSDALLVPDKCKFLHQERMDVCETHLHWHTVAKETCSEKSTNLHDYGMLLPCGIDKFRGVEFVCCPLAEESDNVDSADAEEDDSDVWWGGADTDYADGSEDKVVEVAEEEEVAEVEEEEADDDEDDEDGDEVEEEAEEPYEEATERTTSIATTTTTTTESVEEVVRVSQSLLKTTQEPLARDPVKLPTTAASTPDAVDKYLETPGDENEHAHFQKAKERLEAKHRERMSQVMREWEEAERQAKNLPKADKKAVIQHFQEKVESLEQEAANERQQLVETHMARVEAMLNDRRRLALENYITALQAVPPRPRHVFNMLKKYVRAEQKDRQHTLKHFEHVRMVDPKKAAQIRSQVMTHLRVIYERMNQSLSLLYNVPAVAEEIQDEVDELLQKEQNYSDDVLANMISEPRISYGNDALMPSLTETKTTVELLPVNGEFSLDDLQPWHSFGADSVPANTENEVEPVDARPAADRGLTTRPGSGLTNIKTEEISEVKMDAEFRHDSGYEVHHQKLVFFAEDVGSNKGAIIGLMVGGVVIATVIVITLVMLKKKQYTSIHHGVVEVDAAVTPEERHLSKMQQNGYENPTYKFFEQMQN

SEQ ID NO: 18468 - protein, 3 aa, Artificial Sequence
  Synthetic polypeptide
GTH

SEQ ID NO: 18469 - protein, 29 aa, Artificial Sequence
  Synthetic polypeptide
SQHFGRLRYPLMVMLACWLNPRLPCSVAD

SEQ ID NO: 18470 - protein, 66 aa, Artificial Sequence
  Synthetic polypeptide
CESAESAKIGGIITVFLIALVLTSTIVTLKWIGYICLRNSLPKVLNFHNFLAWPFPNLPPLEAMDM

SEQ ID NO: 18471 - protein, 280 aa, Artificial Sequence
  Synthetic polypeptide
CESAESAKIGGIITVFLIALVLTSTIVTLKWIGYICLRNSLPKVLNFHNFLAWPFPNLPPLEAMDMVEVIYINRKKKVWDYNYDDESDSDTEAAPRTSGGGYTMHGLTVRPLGQASATSTESQLIDPESEEEPDLPEVDVELPTMPKDSPQQLELLSGPCERRKSPLQDPFPEEDYSSTEGSGGRITFNVDLNSVFLRVLDDEDSDDLEAPLMLSSHLEEMVDPEDPDNVQSNHLLASGEGTQPTFPSPSSEGLWSEDAPSDQSDTSESDVDLGDGYIMR

SEQ ID NO: 18472 - protein, 96 aa, Artificial Sequence
  Synthetic polypeptide
CESAESAKIGGIITVFLIALVLTSTIVTLKWIGYICLRNSLPKVLRQGLAKGWNAVAIHRCSHNALQSETPELKQSSCLSFPSSWDYKRASLCPSD

SEQ ID NO: 18473 - protein, 8 aa, Artificial Sequence
  Synthetic polypeptide
VNQQNLPK

SEQ ID NO: 18474 - protein, 39 aa, Artificial Sequence
  Synthetic polypeptide
RTKGTPQIPSFPAARSSAPEDSPVQRRAGPELGASGPEQ

SEQ ID NO: 18475 - protein, 347 aa, Artificial Sequence
  Synthetic polypeptide
VEGGIMVPKDVHALILRVREPGNVLPDVQKGLRRYPLSQLPAPQHPKIRLYNAEQVLSWEPVALSNSTRPVVYQVQFKYTDSKWFTADIMSIGVNCTQITATECDFTAASPSAGFPMDFNVTLRLRAELGALHSAWVTMPWFQHYRNVTVGPPENIEVTPGEGSLIIRFSSPFDIADTSTAFFCYYVHYWEKGGIQQVKGPFRSNSISLDNLKPSRVYCLQVQAQLLWNKSNIFRVGHLSNISCYETMADASTELQQVILISVGTFSLLSVLAGACFFLVLKYRGLIKYWFHTPPSIPLQIEEYLKDPTQPILEALDKDSSPKDDVWDSVSIISFPEKEQEDVLQTL

SEQ ID NO: 18476 - protein, 51 aa, Artificial Sequence
  Synthetic polypeptide
WSPKMSTPSSSESVNLGMCCLTYKRDSADTLFPSCPLLSTRRFACTTQSRS

SEQ ID NO: 18477 - protein, 67 aa, Artificial Sequence
  Synthetic polypeptide
VEGGIMVPKDVHALILRVREPGNVLPDVQKGLRRCEPSFPAARSSAPEDSPVQRRAGPELGASGPEQ

SEQ ID NO: 18478 - protein, 343 aa, Artificial Sequence
  Synthetic polypeptide
WSPKMSTPSSSESVNLGMCCLTYKRDSADVNPLSQLPAPQHPKIRLYNAEQVLSWEPVALSNSTRPVVYQVQFKYTDSKWFTADIMSIGVNCTQITATECDFTAASPSAGFPMDFNVTLRLRAELGALHSAWVTMPWFQHYRNVTVGPPENIEVTPGEGSLIIRFSSPFDIADTSTAFFCYYVHYWEKGGIQQVKGPFRSNSISLDNLKPSRVYCLQVQAQLLWNKSNIFRVGHLSNISCYETMADASTELQQVILISVGTFSLLSVLAGACFFLVLKYRGLIKYWFHTPPSIPLQIEEYLKDPTQPILEALDKDSSPKDDVWDSVSIISFPEKEQEDVLQTL

SEQ ID NO: 18479 - protein, 49 aa, Artificial Sequence; identical to SEQ ID NO: 5204
  Synthetic polypeptide

SEQ ID NO: 18480 - protein, 304 aa, Artificial Sequence; identical to SEQ ID NO: 2491
  Synthetic polypeptide

SEQ ID NO: 18481 - protein, 43 aa, Artificial Sequence; identical to SEQ ID NO: 5531
  Synthetic polypeptide

SEQ ID NO: 18482 - protein, 375 aa, Artificial Sequence
  Synthetic polypeptide
AGSGSGNEVIEGPQNARVLKGSQARFNCTVSQGWKLIMWALSDMVVLSVRPMEPIITNDRFTSQRYDQGGNFTSEMIIHNVEPSDSGNIRCSLQNSRLHGSAYLTVQVMGELFIPSVNLVVAENEPCEVTCLPSHWTRLPDISWELGLLVSHSSYYFVPEPSDLQSAVSILALTPQSNGTLTCVATWKSLKARKSATVNLTVIRCPQDTGGGINIPGVLSSLPSLGFSLPTWGKVGLGLAGTMLLTPTCTLTIRCCCCRRRCCGCNCCCRCCFCCRRKRGFRIQFQKKSEKEKTNKETETESGNENSGYNSDEQKTTDTASLPPKSCESSDPEQRNSSCGPPHQRADQRPPRPASHPQASFNLASPEKVSNTTVV

SEQ ID NO: 18483 - protein, 9 aa, Artificial Sequence
  Synthetic polypeptide
MVLGLVMKS

SEQ ID NO: 18484 - protein, 5 aa, Artificial Sequence
  Synthetic polypeptide
WFWVW

SEQ ID NO: 18485 - protein, 1463 aa, Artificial Sequence
  Synthetic polypeptide
DLMVLSGISAFASSSFSLPDAIHVRWDLLLLAFCHDCEAPPATWTFPPFIQPFEFPRFSIGQRVFIPCVVVSGDLPITITWQKDGRPIPGSLGVTIDNIDFTSSLRISNLSLMHNGNYTCIARNEAAAVEHQSQLIVRVPPKFVVQPRDQDGIYGKAVILNCSAEGYPVPTIVWKFSKGAGVPQFQPIALNGRIQVLSNGSLLIKHVVEEDSGYYLCKVSNDVGADVSKSMYLTVKIPAMITSYPNTTLATQGQKKEMSCTAHGEKPIIVRWEKEDRIINPEMARYLVSTKEVGEEVISTLQILPTVREDSGFFSCHAINSYGEDRGIIQLTVQEPPDPPEIEIKDVKARTITLRWTMGFDGNSPITGYDIECKNKSDSWDSAQRTKDVSPQLNSATIIDIHPSSTYSIRMYAKNRIGKSEPSNELTITADEAAPDGPPQEVHLEPISSQSIRVTWKAPKKHLQNGIIRGYQIGYREYSTGGNFQFNIISVDTSGDSEVYTLDNLNKFTQYGLVVQACNRAGTGPSSQEIITTTLEDVPSYPPENVQAIATSPESISISWSTLSKEALNGILQGFRVIYWANLMDGELGEIKNITTTQPSLELDGLEKYTNYSIQVLAFTRAGDGVRSEQIFTRTKEDVPGPPAGVKAAAASASMVFVSWLPPLKLNGIIRKYTVFCSHPYPTVISEFEASPDSFSYRIPNLSRNRQYSVWVVAVTSAGRGNSSEIITVEPLAKAPARILTFSGTVTTPWMKDIVLPCKAVGDPSPAVKWMKDSNGTPSLVTIDGRRSIFSNGSFIIRTVKAEDSGYYSCIANNNWGSDEIILNLQVQVPPDQPRLTVSKTTSSSITLSWLPGDNGGSSIRGYILQYSEDNSEQWGSFPISPSERSYRLENLKCGTWYKFTLTAQNGVGPGRISEIIEAKTLGKEPQFSKEQELFASINTTRVRLNLIGWNDGGCPITSFTLEYRPFGTTVWTTAQRTSLSKSYILYDLQEATWYELQMRVCNSAGCAEKQANFATLNYDGSTIPPLIKSVVQNEEGLTTNEGLKMLVTISCILVGVLLLFVLLLVVRRRRREQRLKRLRDAKSLAEMLMSKNTRTSDTLSKQQQTLRMHIDIPRAQLLIEERDTMETIDDRSTVLLTDADFGEAAKQKSLTVTHTVHYQSVSQATGPLVDVSDARPGTNPTTRRNAKAGPTARNRYASQWTLNRPHPTISAHTLTTDWRLPTPRAAGSVDKESDSYSVSPSQDTDRARSSMVSTESASSTYEELARAYEHAKMEEQLRHAKFTITECFISDTSSEQLTAGTNEYTDSLTSSTPSESGICRFTASPPKPQDGGRVMNMAVPKAHRPGDLIHLPPYLRMDFLLNRGGPGTSRDLSLGQACLEPQKSRTLKRPTVLEPIPMEAASSASSTREGQSWQPGAVATLPQREGAELGQAAKMSSSQESLLDSRGHLKGNNPYAKSYTLV

SEQ ID NO: 18486 - protein, 1445 aa, Artificial Sequence
  Synthetic polypeptide
DLMVLSGISAFASSSFSLPDAIHVRWDLLLLAFCHDCEAPPATWTFPPFIQPFEFPRFSIGQRVFIPCVVVSGDLPITITWQKDGRPIPGSLGVTIDNIDFTSSLRISNLSLMHNGNYTCIARNEAAAVEHQSQLIVRVPPKFVVQPRDQDGIYGKAVILNCSAEGYPVPTIVWKFSKGAGVPQFQPIALNGRIQVLSNGSLLIKHVVEEDSGYYLCKVSNDVGADVSKSMYLTVKIPAMITSYPNTTLATQGQKKEMSCTAHGEKPIIVRWEKEDRIINPEMARYLVSTKEVGEEVISTLQILPTVREDSGFFSCHAINSYGEDRGIIQLTVQEPPDPPEIEIKDVKARTITLRWTMGFDGNSPITGYDIECKNKSDSWDSAQRTKDVSPQLNSATIIDIHPSSTYSIRMYAKNRIGKSEPSNELTITADEAAPDGPPQEVHLEPISSQSIRVTWKAPKKHLQNGIIRGYQIGYREYSTGGNFQFNIISVDTSGDSEVYTLDNLNKFTQYGLVVQACNRAGTGPSSQEIITTTLEDVPSYPPENVQAIATSPESISISWSTLSKEALNGILQGFRVIYWANLMDGELGEIKNITTTQPSLELDGLEKYTNYSIQVLAFTRAGDGVRSEQIFTRTKEDVPGPPAGVKAAAASASMVFVSWLPPLKLNGIIRKYTVFCSHPYPTVISEFEASPDSFSYRIPNLSRNRQYSVWVVAVTSAGRGNSSEIITVEPLAKAPARILTFSGTVTTPWMKDIVLPCKAVGDPSPAVKWMKDSNGTPSLVTIDGRRSIFSNGSFIIRTVKAEDSGYYSCIANNNWGSDEIILNLQVQVPPDQPRLTVSKTTSSSITLSWLPGDNGGSSIRGYILQYSEDNSEQWGSFPISPSERSYRLENLKCGTWYKFTLTAQNGVGPGRISEIIEAKTLGKEPQFSKEQELFASINTTRVRLNLIGWNDGGCPITSFTLEYRPFGTTVWTTAQRTSLSKSYILYDLQEATWYELQMRVCNSAGCAEKQANFATLNYDGSTIPPLIKSVVQNEEGLTTNEGLKMLVTISCILVGVLLLFVLLLVVRRRRREQRLKRLRDAKSLAEMLMSKNTRTSDTLSKQQQTLRMHIDIPRAQLLIEERDTMETIDDRSTVLLTDADFGEAAKQKSLTVTHTVHYQSVSQATGPLVDVSDARPGTNPTTRRNAKAGPTARNRYASQWTLNRPHPTISAHTLTTDWRLPTPRAAGSVDKESDSYSVSPSQDTDRARSSMVSTESASSTYEELARAYEHAKMEEQLRHAKFTITECFISDTSSEQLTAGTNEYTDSLTSSTPSESGICRFTASPPKPQDGGRVMNMAVPKAHRPGGPGTSRDLSLGQACLEPQKSRTLKRPTVLEPIPMEAASSASSTREGQSWQPGAVATLPQREGAELGQAAKMSSSQESLLDSRGHLKGNNPYAKSYTLV

SEQ ID NO: 18487 - protein, 69 aa, Artificial Sequence
  Synthetic polypeptide
GGTCFSLLSAMIVRLPQPRGPFRLSYNPLSFQDSPLGSGSSSPVLWSQGTYPSRSPGRRMAGQSLGALG

SEQ ID NO: 18488 - protein, 15 aa, Artificial Sequence
  Synthetic polypeptide
GSPSHVDLSAFHTTL

SEQ ID NO: 18489 - protein, 53 aa, Artificial Sequence
  Synthetic polypeptide
CHPCKFRLSYNPLSFQDSPLGSGSSSPVLWSQGTYPSRSPGRRMAGQSLGALG

SEQ ID NO: 18490 - protein, 32 aa, Artificial Sequence
  Synthetic polypeptide
DLMVLSGISAFASSSFSLPDAIHVSSAFHTTL

SEQ ID NO: 18491 - protein, 1418 aa, Artificial Sequence
  Synthetic polypeptide
VPPFIQPFEFPRFSIGQRVFIPCVVVSGDLPITITWQKDGRPIPGSLGVTIDNIDFTSSLRISNLSLMHNGNYTCIARNEAAAVEHQSQLIVRVPPKFVVQPRDQDGIYGKAVILNCSAEGYPVPTIVWKFSKGAGVPQFQPIALNGRIQVLSNGSLLIKHVVEEDSGYYLCKVSNDVGADVSKSMYLTVKIPAMITSYPNTTLATQGQKKEMSCTAHGEKPIIVRWEKEDRIINPEMARYLVSTKEVGEEVISTLQILPTVREDSGFFSCHAINSYGEDRGIIQLTVQEPPDPPEIEIKDVKARTITLRWTMGFDGNSPITGYDIECKNKSDSWDSAQRTKDVSPQLNSATIIDIHPSSTYSIRMYAKNRIGKSEPSNELTITADEAAPDGPPQEVHLEPISSQSIRVTWKAPKKHLQNGIIRGYQIGYREYSTGGNFQFNIISVDTSGDSEVYTLDNLNKFTQYGLVVQACNRAGTGPSSQEIITTTLEDVPSYPPENVQAIATSPESISISWSTLSKEALNGILQGFRVIYWANLMDGELGEIKNITTTQPSLELDGLEKYTNYSIQVLAFTRAGDGVRSEQIFTRTKEDVPGPPAGVKAAAASASMVFVSWLPPLKLNGIIRKYTVFCSHPYPTVISEFEASPDSFSYRIPNLSRNRQYSVWVVAVTSAGRGNSSEIITVEPLAKAPARILTFSGTVTTPWMKDIVLPCKAVGDPSPAVKWMKDSNGTPSLVTIDGRRSIFSNGSFIIRTVKAEDSGYYSCIANNNWGSDEIILNLQVQVPPDQPRLTVSKTTSSSITLSWLPGDNGGSSIRGYILQYSEDNSEQWGSFPISPSERSYRLENLKCGTWYKFTLTAQNGVGPGRISEIIEAKTLGKEPQFSKEQELFASINTTRVRLNLIGWNDGGCPITSFTLEYRPFGTTVWTTAQRTSLSKSYILYDLQEATWYELQMRVCNSAGCAEKQANFATLNYDGSTIPPLIKSVVQNEEGLTTNEGLKMLVTISCILVGVLLLFVLLLVVRRRRREQRLKRLRDAKSLAEMLMSKNTRTSDTLSKQQQTLRMHIDIPRAQLLIEERDTMETIDDRSTVLLTDADFGEAAKQKSLTVTHTVHYQSVSQATGPLVDVSDARPGTNPTTRRNAKAGPTARNRYASQWTLNRPHPTISAHTLTTDWRLPTPRAAGSVDKESDSYSVSPSQDTDRARSSMVSTESASSTYEELARAYEHAKMEEQLRHAKFTITECFISDTSSEQLTAGTNEYTDSLTSSTPSESGICRFTASPPKPQDGGRVMNMAVPKAHRPGDLIHLPPYLRMDFLLNRGGPGTSRDLSLGQACLEPQKSRTLKRPTVLEPIPMEAASSASSTREGQSWQPGAVATLPQREGAELGQAAKMSSSQESLLDSRGHLKGNNPYAKSYTLV

SEQ ID NO: 18492 - protein, 1400 aa, Artificial Sequence
  Synthetic polypeptide
VPPFIQPFEFPRFSIGQRVFIPCVVVSGDLPITITWQKDGRPIPGSLGVTIDNIDFTSSLRISNLSLMHNGNYTCIARNEAAAVEHQSQLIVRVPPKFVVQPRDQDGIYGKAVILNCSAEGYPVPTIVWKFSKGAGVPQFQPIALNGRIQVLSNGSLLIKHVVEEDSGYYLCKVSNDVGADVSKSMYLTVKIPAMITSYPNTTLATQGQKKEMSCTAHGEKPIIVRWEKEDRIINPEMARYLVSTKEVGEEVISTLQILPTVREDSGFFSCHAINSYGEDRGIIQLTVQEPPDPPEIEIKDVKARTITLRWTMGFDGNSPITGYDIECKNKSDSWDSAQRTKDVSPQLNSATIIDIHPSSTYSIRMYAKNRIGKSEPSNELTITADEAAPDGPPQEVHLEPISSQSIRVTWKAPKKHLQNGIIRGYQIGYREYSTGGNFQFNIISVDTSGDSEVYTLDNLNKFTQYGLVVQACNRAGTGPSSQEIITTTLEDVPSYPPENVQAIATSPESISISWSTLSKEALNGILQGFRVIYWANLMDGELGEIKNITTTQPSLELDGLEKYTNYSIQVLAFTRAGDGVRSEQIFTRTKEDVPGPPAGVKAAAASASMVFVSWLPPLKLNGIIRKYTVFCSHPYPTVISEFEASPDSFSYRIPNLSRNRQYSVWVVAVTSAGRGNSSEIITVEPLAKAPARILTFSGTVTTPWMKDIVLPCKAVGDPSPAVKWMKDSNGTPSLVTIDGRRSIFSNGSFIIRTVKAEDSGYYSCIANNNWGSDEIILNLQVQVPPDQPRLTVSKTTSSSITLSWLPGDNGGSSIRGYILQYSEDNSEQWGSFPISPSERSYRLENLKCGTWYKFTLTAQNGVGPGRISEIIEAKTLGKEPQFSKEQELFASINTTRVRLNLIGWNDGGCPITSFTLEYRPFGTTVWTTAQRTSLSKSYILYDLQEATWYELQMRVCNSAGCAEKQANFATLNYDGSTIPPLIKSVVQNEEGLTTNEGLKMLVTISCILVGVLLLFVLLLVVRRRRREQRLKRLRDAKSLAEMLMSKNTRTSDTLSKQQQTLRMHIDIPRAQLLIEERDTMETIDDRSTVLLTDADFGEAAKQKSLTVTHTVHYQSVSQATGPLVDVSDARPGTNPTTRRNAKAGPTARNRYASQWTLNRPHPTISAHTLTTDWRLPTPRAAGSVDKESDSYSVSPSQDTDRARSSMVSTESASSTYEELARAYEHAKMEEQLRHAKFTITECFISDTSSEQLTAGTNEYTDSLTSSTPSESGICRFTASPPKPQDGGRVMNMAVPKAHRPGGPGTSRDLSLGQACLEPQKSRTLKRPTVLEPIPMEAASSASSTREGQSWQPGAVATLPQREGAELGQAAKMSSSQESLLDSRGHLKGNNPYAKSYTLV

SEQ ID NO: 18493 - protein, 6 aa, Artificial Sequence
  Synthetic polypeptide
EATDSR

SEQ ID NO: 18494 - protein, 56 aa, Artificial Sequence
  Synthetic polypeptide
SSFPNPSSFKVPVSVLAQRHTSQTAGWPPCTFIRSYRFSLTLEAVTLPWQEPRTPT

SEQ ID NO: 18495 - protein, 340 aa, Artificial Sequence
  Synthetic polypeptide
TAEYVCLANPFSVKLLPQPLLLQSACLCSCTKAHFPDCRMAALHLYKKLQILVDTGSSNFAVAGTPHSYIDTYFDTERSSTYRSKGFDVTVKYTQGSWTGFVGEDLVTIPKGFNTSFLVNIATIFESENFFLPGIKWNGILGLAYATLAKPSSSLETFFDSLVTQANIPNVFSMQMCGAGLPVAGSGTNGGSLVLGGIEPSLYKGDIWYTPIKEEWYYQIEILKLEIGGQSLNLDCREYNADKAIVDSGTTLLRLPQKVFDAVVEAVARASLIPEFSDGFWTGSQLACWTNSETPWSYFPKISIYLRDENSSRSFRITILPQKLQVLQCLKFPGLSQQRM

SEQ ID NO: 18496 - protein, 462 aa, Artificial Sequence
  Synthetic polypeptide
TAEYVCLANPFSVKLLPQPLLLQSACLCSCTKAHFPDCRMAALHLYKKLQILVDTGSSNFAVAGTPHSYIDTYFDTERSSTYRSKGFDVTVKYTQGSWTGFVGEDLVTIPKGFNTSFLVNIATIFESENFFLPGIKWNGILGLAYATLAKPSSSLETFFDSLVTQANIPNVFSMQMCGAGLPVAGSGTNGGSLVLGGIEPSLYKGDIWYTPIKEEWYYQIEILKLEIGGQSLNLDCREYNADKAIVDSGTTLLRLPQKVFDAVVEAVARASLIPEFSDGFWTGSQLACWTNSETPWSYFPKISIYLRDENSSRSFRITILPQLYIQPMMGAGLNYECYRFGISPSTNALVIGATVMEGFYVIFDRAQKRVGFAASPCAEIAGAAVSEISGPFSTEDVASNCVPAQSLSEPILWIVSYALMSVCGAILLVLIVLLLLPFRCQRRPRDPEVVNDESSLVRHRWK

SEQ ID NO: 18497 - protein, 412 aa, Artificial Sequence
  Synthetic polypeptide
TAEYVCLANPFSVKLLPQPLLLQSACLCSCTKAHFPDCRMAALHLYKKLQILVDTGSSNFAVAGTPHSYIDTYFDTERSSTYRSKGFDVTVKYTQGSWTGFVGEDLVTIPKGFNTSFLVNIATIFESENFFLPGIKWNGILGLAYATLAKPSSSLETFFDSLVTQANIPNVFSMQMCGAGLPVAGSGTNGGSLVLGGIEPSLYKGDIWYTPIKEEWYYQIEILKLEIGGQSLNLDCREYNADKAIVDSGTTLLRLPQKVFDAVVEAVARASLLYIQPMMGAGLNYECYRFGISPSTNALVIGATVMEGFYVIFDRAQKRVGFAASPCAEIAGAAVSEISGPFSTEDVASNCVPAQSLSEPILWIVSYALMSVCGAILLVLIVLLLLPFRCQRRPRDPEVVNDESSLVRHRWK

SEQ ID NO: 18498 - protein, 21 aa, Artificial Sequence
  Synthetic polypeptide
AESSMWLVSVWPVRNCRCCSV

SEQ ID NO: 18499 - protein, 19 aa, Artificial Sequence
  Synthetic polypeptide
EIAGAAVSEISGPFSTEDV

SEQ ID NO: 18500 - protein, 84 aa, Artificial Sequence
  Synthetic polypeptide
EIAGAAVSEISGPFSTEDVASNCVPAQSLSEPILWIVSYALMSVCGAILLVLIVLLLLPFRCQRRPRDPEVVNDESSLVRHRWK

SEQ ID NO: 18501 - protein, 30 aa, Artificial Sequence
  Synthetic polypeptide
IQHVACFCMACEKLQVLQCLKFPGLSQQRM

SEQ ID NO: 18502 - protein, 24 aa, Artificial Sequence
  Synthetic polypeptide
APGMLLNLPQGTRQPPDSKESSRD

SEQ ID NO: 18503 - protein, 197 aa, Artificial Sequence; identical to SEQ ID NO: 2874
  Synthetic polypeptide

SEQ ID NO: 18504 - protein, 467 aa, Artificial Sequence; identical to SEQ ID NO: 2106
  Synthetic polypeptide

SEQ ID NO: 18505 - protein, 470 aa, Artificial Sequence; identical to SEQ ID NO: 2092
  Synthetic polypeptide

SEQ ID NO: 18506 - protein, 33 aa, Artificial Sequence; identical to SEQ ID NO: 6260
  Synthetic polypeptide

SEQ ID NO: 18507 - protein, 531 aa, Artificial Sequence
  Synthetic polypeptide
PGNTYRRQTCESRQPSFPSAGHIEHSRYLSLLDAVDNSKMALNSGSPPAIGPYYENHGYQPENPYPAQPTVVPTVYEVHPAQYYPSPVPQYAPRVLTQASNPVVCTQPKSPSGTVCTSKTKKALCITLTLGTFLVGAALAAGLLWKFMGSKCSNSGIECDSSGTCINPSNWCDGVSHCPGGEDENRCVRLYGPNFILQVYSSQRKSWHPVCQDDWNENYGRAACRDMGYKNNFYSSQGIVDDSGSTSFMKLNTSAGNVDIYKKLYHSDACSSKAVVSLRCIACGVNLNSSRQSRIVGGESALPGAWPWQVSLHVQNVHVCGGSIITPEWIVTAAHCVEKPLNNPWHWTAFAGILRQSFMFYGAGYQVEKVISHPNYDSKTKNNDIALMKLQKPLTFNDLVKPVCLPNPGMMLQPEQLCWISGWGATEEKGKTSEVLNAAKVLLIETQRCNSRYVYDNLITPAMICAGFLQGNVDSCQGDSGGPLVTSKNNIWWLIGDTSWGSGCAKAYRPGVYGNVMVFTDWIYRQMRADG

SEQ ID NO: 18508 - protein, 57 aa, Artificial Sequence
  Synthetic polypeptide
SRPHSTWLRGGLHVGSLGILTEGKPANQDSPLFLQQVILNIPDTYHYSMLLITARWL

SEQ ID NO: 18509 - protein, 42 aa, Artificial Sequence
  Synthetic polypeptide
WCTEAGPTLLGSVVGFMLVAWEYLPKANLRIKTALFSFSRSY

SEQ ID NO: 18510 - protein, 77 aa, Artificial Sequence
  Synthetic polypeptide
GNDIGERDKITENPVSTGEKNAATWSILAVLCLLVVVAVAIGWVCRDRCLQHSYAGAWAVSPETELTESWNLLLLLS

SEQ ID NO: 18511 - protein, 241 aa, Artificial Sequence
  Synthetic polypeptide
GNDIGERDKITENPVSTGEKNAATWSILAVLCLLVVVAVAIGWVCRDRCLQHSYAGAWAVSPETELTGEFAVGSSRFWGAQGRLGCQLSFRVSKNFQKAKVPCLEQLLFLETQRSPRWCAWHFLQPPLGMGWHPGVHFVTLRWDFPNMHRSRETSARPPRSPVPSPDQGVQGGSRHRRPAPMGCPEWVQAPAPSPRGVSRAGPGTGAQPLWGVRSGSGHRQLLSVAATPAALVCPSVPGAT

SEQ ID NO: 18512 - protein, 70 aa, Artificial Sequence
  Synthetic polypeptide
GNDIGERDKITENPVSTGEKNAATWSILAVLCLLVVVAVAIGWVCRDRCLQHSYAGAWAVSPETELTGHV

SEQ ID NO: 18513 - protein, 55 aa, Artificial Sequence
  Synthetic polypeptide
GQACGTLFMQSVQNREMTSERETRSQRIQSVPARKTRPRGASWLSCACLWSWRWP

SEQ ID NO: 18514 - protein, 22 aa, Artificial Sequence
  Synthetic polypeptide
QSQTPEDKPVGLCLCKVSRIGK

SEQ ID NO: 18515 - protein, 106 aa, Artificial Sequence
  Synthetic polypeptide
GIVSFVHRGGKAEGRSCHGERCGSSSKSSAWKHCRTQQFSPSDIGQRIQNRDSNKCLSVNVHGSQKEMTSERETRSQRIQSVPARKTRPRGASWLSCACLWSWRWP

SEQ ID NO: 18516 - protein, 8 aa, Artificial Sequence
  Synthetic polypeptide
MFMAARRK

SEQ ID NO: 18517 - protein, 101 aa, Artificial Sequence
  Synthetic polypeptide
RYRPEDSEQGLKQMPVRECSWQPEGNDIGERDKITENPVSTGEKNAATWSILAVLCLLVVVAVAIGWVCRDRCLQHSYAGAWAVSPETELTESWNLLLLLS

SEQ ID NO: 18518 - protein, 265 aa, Artificial Sequence
  Synthetic polypeptide
RYRPEDSEQGLKQMPVRECSWQPEGNDIGERDKITENPVSTGEKNAATWSILAVLCLLVVVAVAIGWVCRDRCLQHSYAGAWAVSPETELTGEFAVGSSRFWGAQGRLGCQLSFRVSKNFQKAKVPCLEQLLFLETQRSPRWCAWHFLQPPLGMGWHPGVHFVTLRWDFPNMHRSRETSARPPRSPVPSPDQGVQGGSRHRRPAPMGCPEWVQAPAPSPRGVSRAGPGTGAQPLWGVRSGSGHRQLLSVAATPAALVCPSVPGAT

SEQ ID NO: 18519 - protein, 94 aa, Artificial Sequence
  Synthetic polypeptide
RYRPEDSEQGLKQMPVRECSWQPEGNDIGERDKITENPVSTGEKNAATWSILAVLCLLVVVAVAIGWVCRDRCLQHSYAGAWAVSPETELTGHV

SEQ ID NO: 18520 - protein, 19 aa, Artificial Sequence
  Synthetic polypeptide
FIDFNQKNHTVQQIGYRSR

SEQ ID NO: 18521 - protein, 89 aa, Artificial Sequence
  Synthetic polypeptide
NFFFLRDSPLPGFGVVSRKNVHSDLKRLLRHPTFFQLHVSLKKDLIHRLQPKKPHSTTDWIQEQVTSLKKDMKRKGQSCLHVIYRLFKE

SEQ ID NO: 18522 - protein, 1558 aa, Artificial Sequence
  Synthetic polypeptide
TSTKKTTQYNRLDTGAGDITQKGYEKKRAKLLARYIPLIQGIDPSLQAENRIPGPSQTTAAAPKQQKSRPTASRDERFRSDVHTEAVQAALAKYKERKMPMPSKRRSVLVHSSVETYTPPDTSSASEDEGSLRRPGRLTSTPLQSHSSVEPWLDRVIQGSSTSSSASSTSSHPGGRPTTAPSAAATPGAAATTALAGLEAHTHIADLHSAPPDVTTGLVEHSYFERPQVASVRSVPRGCSGSMLETADGVPVNSRVSSKIQQLLNTLKRPKRPPLKEFFVDDFEELLEVQQPDPNQPKPEGSETSVLRGEPLTAGVPRPPSLLATLQRWGTTQPKSPCLTALDTTGKAVYTLTYGKLWSRSLKLAYTLLNKLTSKNEPLLKPGDRVALVFPNSDPVMFMVAFYGCLLAELVPVPIEVPLTRKDAGSQQVGFLLGSCGVFLALTTDACQKGLPKAQTGEVAAFKGWPPLSWLVIDGKHLAKPPKDWHPLAQDTGTGTAYIEYKTSKEGSTVGVTVSHASLLAQCRALTQACGYSEAETLTNVLDFKRDAGLWHGVLTSVMNRMHVVSVPYALMKANPLSWIQKVCFYKARAALVKSRDMHWSLLAQRGQRDVSLSSLRMLIVADGANPWSISSCDAFLNVFQSRGLRPEVICPCASSPEALTVAIRRPPDLGGPPPRKAVLSMNGLSYGVIRVDTEEKLSVLTVQDVGQVMPGANVCVVKLEGTPYLCKTDEVGEICVSSSATGTAYYGLLGITKNVFEAVPVTTGGAPIFDRPFTRTGLLGFIGPDNLVFIVGKLDGLMVTGVRRHNADDVVATALAVEPMKFVYRGRIAVFSVTVLHDDRIVLVAEQRPDASEEDSFQWMSRVLQAIDSIHQVGVYCLALVPANTLPKAPLGGIHISETKQRFLEGTLHPCNVLMCPHTCVTNLPKPRQKQPEVGPASMIVGNLVAGKRIAQASGRELAHLEDSDQARKFLFLADVLQWRAHTTPDHPLFLLLNAKGTVTSTATCVQLHKRAERVAAALMEKGRLSVGDHVALVYPPGVDLIAAFYGCLYCGCVPVTVRPPHPQNLGTTLPTVKMIVEVSKSACVLTTQAVTRLLRSKEAAAAVDIRTWPTILDTDDIPKKKIASVFRPPSPDVLAYLDFSVSTTGILAGVKMSHAATSALCRSIKLQCELYPSRQIAICLDPYCGLGFALWCLCSVYSGHQSVLVPPLELESNVSLWLSAVSQYKARVTFCSYSVMEMCTKGLGAQTGVLRMKGVNLSCVRTCMVVAEERPRIALTQSFSKLFKDLGLPARAVSTTFGCRVNVAICLQGTAGPDPTTVYVDMRALRHDRVRLVERGSPHSLPLMESGKILPGVKVIIAHTETKGPLGDSHLGEIWVSSPHNATGYYTVYGEEALHADHFSARLSFGDTQTIWARTGYLGFLRRTELTDASGGRHDALYVVGSLDETLELRGMRYHPIDIETSVIRAHRSIAECAVFTWTNLLVVVVELDGLEQDALDLVALVTNVVLEEHYLVVGVVVIVDPGVIPINSRGEKQRMHLRDGFLADQLDPIYVAYNM

SEQ ID NO: 18523 - protein, 1553 aa, Artificial Sequence
  Synthetic polypeptide
TSTKKTTQYNRLDTGAGDITQKGYEKKRAKLLARYIPLIQGIDPSLQAENRIPGPSQTTAAAPKQQKSRPTASRDERFRSDVHTEAVQAALAKYKERKMPMPSKRRSVLVHSSVETYTPPDTSSASEDEGSLRRPGRLTSTPLQSHSSVEPWLDRVIQGSSTSSSASSTSSHPGGRPTTAPSAAATPGAAATTALAGLEAHTHIDLHSAPPDVTTGLVEHSYFERPQVASVRSVPRGCSGSMLETADGVPVNSRVSSKIQQLLNTLKRPKRPPLKEFFVDDFEELLEDPNQPKPEGSETSVLRGEPLTAGVPRPPSLLATLQRWGTTQPKSPCLTALDTTGKAVYTLTYGKLWSRSLKLAYTLLNKLTSKNEPLLKPGDRVALVFPNSDPVMFMVAFYGCLLAELVPVPIEVPLTRKDAGSQQVGFLLGSCGVFLALTTDACQKGLPKAQTGEVAAFKGWPPLSWLVIDGKHLAKPPKDWHPLAQDTGTGTAYIEYKTSKEGSTVGVTVSHASLLAQCRALTQACGYSEAETLTNVLDFKRDAGLWHGVLTSVMNRMHVVSVPYALMKANPLSWIQKVCFYKARAALVKSRDMHWSLLAQRGQRDVSLSSLRMLIVADGANPWSISSCDAFLNVFQSRGLRPEVICPCASSPEALTVAIRRPPDLGGPPPRKAVLSMNGLSYGVIRVDTEEKLSVLTVQDVGQVMPGANVCVVKLEGTPYLCKTDEVGEICVSSSATGTAYYGLLGITKNVFEAVPVTTGGAPIFDRPFTRTGLLGFIGPDNLVFIVGKLDGLMVTGVRRHNADDVVATALAVEPMKFVYRGRIAVFSVTVLHDDRIVLVAEQRPDASEEDSFQWMSRVLQAIDSIHQVGVYCLALVPANTLPKAPLGGIHISETKQRFLEGTLHPCNVLMCPHTCVTNLPKPRQKQPEVGPASMIVGNLVAGKRIAQASGRELAHLEDSDQARKFLFLADVLQWRAHTTPDHPLFLLLNAKGTVTSTATCVQLHKRAERVAAALMEKGRLSVGDHVALVYPPGVDLIAAFYGCLYCGCVPVTVRPPHPQNLGTTLPTVKMIVEVSKSACVLTTQAVTRLLRSKEAAAAVDIRTWPTILDTDDIPKKKIASVFRPPSPDVLAYLDFSVSTTGILAGVKMSHAATSALCRSIKLQCELYPSRQIAICLDPYCGLGFALWCLCSVYSGHQSVLVPPLELESNVSLWLSAVSQYKARVTFCSYSVMEMCTKGLGAQTGVLRMKGVNLSCVRTCMVVAEERPRIALTQSFSKLFKDLGLPARAVSTTFGCRVNVAICLQGTAGPDPTTVYVDMRALRHDRVRLVERGSPHSLPLMESGKILPGVKVIIAHTETKGPLGDSHLGEIWVSSPHNATGYYTVYGEEALHADHFSARLSFGDTQTIWARTGYLGFLRRTELTDASGGRHDALYVVGSLDETLELRGMRYHPIDIETSVIRAHRSIAECAVFTWTNLLVVVVELDGLEQDALDLVALVTNVVLEEHYLVVGVVVIVDPGVIPINSRGEKQRMHLRDGFLADQLDPIYVAYNM

SEQ ID NO: 18524 - protein, 827 aa, Artificial Sequence
  Synthetic polypeptide
TSTKKTTQYNRLDTGAGDITQKGYEKKRAKLLARYIPLIQGIDPSLQAENRIPGPSQTTAAAPKQQKSRPTASRDERFRSDVHTEAVQAALAKYKERKMPMPSKRRSVLVHSSVETYTPPDTSSASEDEGSLRRPGRLTSTPLQSHSSVEPWLDRVIQGSSTSSSASSTSSHPGGRPTTAPSAAATPGAAATTALAGLEAHTHIDLHSAPPDVTTGLVEHSYFERPQVASVRSVPRGCSGSMLETADGVPVNSRVSSKIQQLLNTLKRPKRPPLKEFFVDDFEELLEVQQPDPNQPKPEGSETSVLRGEPLTAGVPRPPSLLATLQRWGTTQPKSPCLTALDTTGKAVYTLTYGKLWSRSLKLAYTLLNKLTSKNEPLLKPGDRVALVFPNSDPVMFMVAFYGCLLAELVPVPIEVPLTRKDAGSQQVGFLLGSCGVFLALTTDACQKGLPKAQTGEVAAFKGWPPLSWLVIDGKHLAKPPKDWHPLAQDTGTGTAYIEYKTSKEGSTVGVTVSHASLLAQCRALTQACGYSEAETLTNVLDFKRDAGLWHGVLTSVMNRMHVVSVPYALMKANPLSWIQKVCFYKARAALVKSRDMHWSLLAQRGQRDVSLSSLRMLIVADGANPWSISSCDAFLNVFQSRGLRPEVICPCASSPEALTVAIRRPPDLGGPPPRKAVLSMNGLSYGVIRVDTEEKLSVLTVQDVGQVMPGANVCVVKLEGTPYLCKTDEVGEICVSSSATGTAYYGLLGITKNVFEAVPVTTGGAPIFDRPFTRTGLLGFIGPDNLVFIVGKLDGLMVTGVRRHNADDVVATALAVEPMKFVYRGR

SEQ ID NO: 18525 - protein, 1557 aa, Artificial Sequence
  Synthetic polypeptide
TSTKKTTQYNRLDTGAGDITQKGYEKKRAKLLARYIPLIQGIDPSLQAENRIPGPSQTTAAAPKQQKSRPTASRDERFRSDVHTEAVQAALAKYKERKMPMPSKRRSVLVHSSVETYTPPDTSSASEDEGSLRRPGRLTSTPLQSHSSVEPWLDRVIQGSSTSSSASSTSSHPGGRPTTAPSAAATPGAAATTALAGLEAHTHIDLHSAPPDVTTGLVEHSYFERPQVASVRSVPRGCSGSMLETADGVPVNSRVSSKIQQLLNTLKRPKRPPLKEFFVDDFEELLEVQQPDPNQPKPEGSETSVLRGEPLTAGVPRPPSLLATLQRWGTTQPKSPCLTALDTTGKAVYTLTYGKLWSRSLKLAYTLLNKLTSKNEPLLKPGDRVALVFPNSDPVMFMVAFYGCLLAELVPVPIEVPLTRKDAGSQQVGFLLGSCGVFLALTTDACQKGLPKAQTGEVAAFKGWPPLSWLVIDGKHLAKPPKDWHPLAQDTGTGTAYIEYKTSKEGSTVGVTVSHASLLAQCRALTQACGYSEAETLTNVLDFKRDAGLWHGVLTSVMNRMHVVSVPYALMKANPLSWIQKVCFYKARAALVKSRDMHWSLLAQRGQRDVSLSSLRMLIVADGANPWSISSCDAFLNVFQSRGLRPEVICPCASSPEALTVAIRRPPDLGGPPPRKAVLSMNGLSYGVIRVDTEEKLSVLTVQDVGQVMPGANVCVVKLEGTPYLCKTDEVGEICVSSSATGTAYYGLLGITKNVFEAVPVTTGGAPIFDRPFTRTGLLGFIGPDNLVFIVGKLDGLMVTGVRRHNADDVVATALAVEPMKFVYRGRIAVFSVTVLHDDRIVLVAEQRPDASEEDSFQWMSRVLQAIDSIHQVGVYCLALVPANTLPKAPLGGIHISETKQRFLEGTLHPCNVLMCPHTCVTNLPKPRQKQPEVGPASMIVGNLVAGKRIAQASGRELAHLEDSDQARKFLFLADVLQWRAHTTPDHPLFLLLNAKGTVTSTATCVQLHKRAERVAAALMEKGRLSVGDHVALVYPPGVDLIAAFYGCLYCGCVPVTVRPPHPQNLGTTLPTVKMIVEVSKSACVLTTQAVTRLLRSKEAAAAVDIRTWPTILDTDDIPKKKIASVFRPPSPDVLAYLDFSVSTTGILAGVKMSHAATSALCRSIKLQCELYPSRQIAICLDPYCGLGFALWCLCSVYSGHQSVLVPPLELESNVSLWLSAVSQYKARVTFCSYSVMEMCTKGLGAQTGVLRMKGVNLSCVRTCMVVAEERPRIALTQSFSKLFKDLGLPARAVSTTFGCRVNVAICLQGTAGPDPTTVYVDMRALRHDRVRLVERGSPHSLPLMESGKILPGVKVIIAHTETKGPLGDSHLGEIWVSSPHNATGYYTVYGEEALHADHFSARLSFGDTQTIWARTGYLGFLRRTELTDASGGRHDALYVVGSLDETLELRGMRYHPIDIETSVIRAHRSIAECAVFTWTNLLVVVVELDGLEQDALDLVALVTNVVLEEHYLVVGVVVIVDPGVIPINSRGEKQRMHLRDGFLADQLDPIYVAYNM

SEQ ID NO: 18526 - protein, 875 aa, Artificial Sequence
  Synthetic polypeptide
TSTKKTTQYNRLDTGAGDITQKGYEKKRAKLLARYIPLIQGIDPSLQAENRIPGPSQTTAAAPKQQKSRPTASRDERFRSDVHTEAVQAALAKYKERKMPMPSKRRSVLVHSSVETYTPPDTSSASEDEGSLRRPGRLTSTPLQSHSSVEPWLDRVIQGSSTSSSASSTSSHPGGRPTTAPSAAATPGAAATTALAGLEAHTHIDLHSAPPDVTTGLVEHSYFERPQVASVRSVPRGCSGSMLETADGVPVNSRVSSKIQQLLNTLKRPKRPPLKEFFVDDFEELLEVQQPDPNQPKPEGSETSVLRGEPLTAGVPRPPSLLATLQRWGTTQPKSPCLTALDTTGKAVYTLTYGKLWSRSLKLAYTLLNKLTSKNEPLLKPGDRVALVFPNSDPVMFMVAFYGCLLAELVPVPIEVPLTRKDAGSQQVGFLLGSCGVFLALTTDACQKGLPKAQTGEVAAFKGWPPLSWLVIDGKHLAKPPKDWHPLAQDTGTGTAYIEYKTSKEGSTVGVTVSHASLLAQCRALTQACGYSEAETLTNVLDFKRDAGLWHGVLTSVMNRMHVVSVPYALMKANPLSWIQKVCFYKARAALVKSRDMHWSLLAQRGQRDVSLSSLRMLIVADGANPWSISSCDAFLNVFQSRGLRPEVICPCASSPEALTVAIRRPPDLGGPPPRKAVLSMNGLSYGVIRVDTEEKLSVLTVQDVGQVMPGANVCVVKLEGTPYLCKTDEVGEICVSSSATGTAYYGLLGITKNVFEAVPVTTGGAPIFDRPFTRTGLLGFIGPDNLVFIVGKLDGLMVTGVRRHNADDVVATALAVEPMKFVYRGRIAVFSVTVLHDDRIVLVAEQRPDASEEDSFQWMSRVLQVGAPARPMVR

SEQ ID NO: 18527 - protein, 784 aa, Artificial Sequence
  Synthetic polypeptide
TSTKKTTQYNRLDTGAGDITQKGYEKKRAKLLARYIPLIQGIDPSLQAENRIPGPSQTTAAAPKQQKSRPTASRDERFRSDVHTEAVQAALAKYKERKMPMPSKRRSVLVHSSVETYTPPDTSSASEDEGSLRRPGRLTSTPLQSHSSVEPWLDRVIQGSSTSSSASSTSSHPGGRPTTAPSAAATPGAAATTALAGLEAHTHIGVPVNSRVSSKIQQLLNTLKRPKRPPLKEFFVDDFEELLEVQQPDPNQPKPEGSETSVLRGEPLTAGVPRPPSLLATLQRWGTTQPKSPCLTALDTTGKAVYTLTYGKLWSRSLKLAYTLLNKLTSKNEPLLKPGDRVALVFPNSDPVMFMVAFYGCLLAELVPVPIEVPLTRKDAGSQQVGFLLGSCGVFLALTTDACQKGLPKAQTGEVAAFKGWPPLSWLVIDGKHLAKPPKDWHPLAQDTGTGTAYIEYKTSKEGSTVGVTVSHASLLAQCRALTQACGYSEAETLTNVLDFKRDAGLWHGVLTSVMNRMHVVSVPYALMKANPLSWIQKVCFYKARAALVKSRDMHWSLLAQRGQRDVSLSSLRMLIVADGANPWSISSCDAFLNVFQSRGLRPEVICPCASSPEALTVAIRRPPDLGGPPPRKAVLSMNGLSYGVIRVDTEEKLSVLTVQDVGQVMPGANVCVVKLEGTPYLCKTDEVGEICVSSSATGTAYYGLLGITKNVFEAVPVTTGGAPIFDRPFTRTGLLGFIGPDNLVFIVGKLDGLMVTGVRRHNADDVVATALAVEPMKFVYRGR

SEQ ID NO: 18528 - protein, 62 aa, Artificial Sequence
  Synthetic polypeptide
QCFSQLGNFAPSLPGDFWQLLKTFLLVTTQGRGVLLASRQPGLHRGQTGRADGHWSSQTQCR

SEQ ID NO: 18529 - protein, 60 aa, Artificial Sequence
  Synthetic polypeptide
RHFCLSQLKGGECSWHLDNLVFIVGKLDGLMVTGVRRHNADDVVATALAVEPMKFVYRGR

SEQ ID NO: 18530 - protein, 393 aa, Artificial Sequence
  Synthetic polypeptide
RHFCLSQLKGGECSWHLDNLVFIVGKLDGLMVTGVRRHNADDVVATALAVEPMKFVYRGRIAVFSVTVLHDDRIVLVAEQRPDASEEDSFQWMSRVLQAIDSIHQVGVYCLALVPANTLPKAPLGGIHISETKQRFLEGTLHPCNVLMCPHTCVTNLPKPRQKQPEVGPASMIVGNLVAGKRIAQASGRELAHLEDSDQARKFLFLADVLQWRAHTTPDHPLFLLLNAKGTVTSTATCVQLHKRAERVAAALMEKGRLSVGDHVALVYPPGVDLIAAFYGCLYCGCVPVTVRPPHPQNLGTTLPTVKMIVEVSKSACVLTTQAVTRLLRSKEAAAAVDIRTWPTILDTDDIPKKKIASVFRPPSPDVLAYLDFSVSTTGILAGVKAGRGGSRL

SEQ ID NO: 18531 - protein, 790 aa, Artificial Sequence
  Synthetic polypeptide
RHFCLSQLKGGECSWHLDNLVFIVGKLDGLMVTGVRRHNADDVVATALAVEPMKFVYRGRIAVFSVTVLHDDRIVLVAEQRPDASEEDSFQWMSRVLQAIDSIHQVGVYCLALVPANTLPKAPLGGIHISETKQRFLEGTLHPCNVLMCPHTCVTNLPKPRQKQPEVGPASMIVGNLVAGKRIAQASGRELAHLEDSDQARKFLFLADVLQWRAHTTPDHPLFLLLNAKGTVTSTATCVQLHKRAERVAAALMEKGRLSVGDHVALVYPPGVDLIAAFYGCLYCGCVPVTVRPPHPQNLGTTLPTVKMIVEVSKSACVLTTQAVTRLLRSKEAAAAVDIRTWPTILDTDDIPKKKIASVFRPPSPDVLAYLDFSVSTTGILAGVKMSHAATSALCRSIKLQCELYPSRQIAICLDPYCGLGFALWCLCSVYSGHQSVLVPPLELESNVSLWLSAVSQYKARVTFCSYSVMEMCTKGLGAQTGVLRMKGVNLSCVRTCMVVAEERPRIALTQSFSKLFKDLGLPARAVSTTFGCRVNVAICLQGTAGPDPTTVYVDMRALRHDRVRLVERGSPHSLPLMESGKILPGVKVIIAHTETKGPLGDSHLGEIWVSSPHNATGYYTVYGEEALHADHFSARLSFGDTQTIWARTGYLGFLRRTELTDASGGRHDALYVVGSLDETLELRGMRYHPIDIETSVIRAHRSIAECAVFTWTNLLVVVVELDGLEQDALDLVALVTNVVLEEHYLVVGVVVIVDPGVIPINSRGEKQRMHLRDGFLADQLDPIYVAYNM

SEQ ID NO: 18532 - protein, 108 aa, Artificial Sequence
  Synthetic polypeptide
RHFCLSQLKGGECSWHLDNLVFIVGKLDGLMVTGVRRHNADDVVATALAVEPMKFVYRGRIAVFSVTVLHDDRIVLVAEQRPDASEEDSFQWMSRVLQVGAPARPMVR

SEQ ID NO: 18533 - protein, 437 aa, Artificial Sequence
  Synthetic polypeptide
GGAWWLTPVIPALREAEAGGSQDQEMETILANMSHAATSALCRSIKLQCELYPSRQIAICLDPYCGLGFALWCLCSVYSGHQSVLVPPLELESNVSLWLSAVSQYKARVTFCSYSVMEMCTKGLGAQTGVLRMKGVNLSCVRTCMVVAEERPRIALTQSFSKLFKDLGLPARAVSTTFGCRVNVAICLQGTAGPDPTTVYVDMRALRHDRVRLVERGSPHSLPLMESGKILPGVKVIIAHTETKGPLGDSHLGEIWVSSPHNATGYYTVYGEEALHADHFSARLSFGDTQTIWARTGYLGFLRRTELTDASGGRHDALYVVGSLDETLELRGMRYHPIDIETSVIRAHRSIAECAVFTWTNLLVVVVELDGLEQDALDLVALVTNVVLEEHYLVVGVVVIVDPGVIPINSRGEKQRMHLRDGFLADQLDPIYVAYNM

SEQ ID NO: 18534 - protein, 48 aa, Artificial Sequence
  Synthetic polypeptide
RGVVAHACNPSTSGGRGGWITRSRDGDHPGQHVARGHKRLMPLHKAAV

SEQ ID NO: 18535 - protein, 35 aa, Artificial Sequence
  Synthetic polypeptide
SQHFGRPRRVDHKIKRWRPSWPTCRTRPQAPYAAP

SEQ ID NO: 18536 - protein, 164 aa, Artificial Sequence
  Synthetic polypeptide
GGAWWLTPVIPALREAEAGGSQDQEMETILANCLLGTPISAGAPAGAGEQRVPVAVGRQPVQGPRHLLLLLCDGDVHQGPRRTDGCPQDEGGEPVMCAHVHGGRRGAAQDCADPVLLQALQGPGPAGPRRKHHVRVQGQRGHLPPGHSWPGPHNRLRGHAGTAP

SEQ ID NO: 18537 - protein, 71 aa, Artificial Sequence
  Synthetic polypeptide
RGVVAHACNPSTSGGRGGWITRSRDGDHPGQLSTRDTNQCWCPRWSWRATCPCGCRPSASTRPASPSAPTL

SEQ ID NO: 18538 - protein, 384 aa, Artificial Sequence
  Synthetic polypeptide
SQHFGRPRRVDHKIKRWRPSWPTVYSGHQSVLVPPLELESNVSLWLSAVSQYKARVTFCSYSVMEMCTKGLGAQTGVLRMKGVNLSCVRTCMVVAEERPRIALTQSFSKLFKDLGLPARAVSTTFGCRVNVAICLQGTAGPDPTTVYVDMRALRHDRVRLVERGSPHSLPLMESGKILPGVKVIIAHTETKGPLGDSHLGEIWVSSPHNATGYYTVYGEEALHADHFSARLSFGDTQTIWARTGYLGFLRRTELTDASGGRHDALYVVGSLDETLELRGMRYHPIDIETSVIRAHRSIAECAVFTWTNLLVVVVELDGLEQDALDLVALVTNVVLEEHYLVVGVVVIVDPGVIPINSRGEKQRMHLRDGFLADQLDPIYVAYNM

SEQ ID NO: 18539 - protein, 438 aa, Artificial Sequence
  Synthetic polypeptide
GGAWWLTPVIPALREAEAGGSQDQEMETILANVMSHAATSALCRSIKLQCELYPSRQIAICLDPYCGLGFALWCLCSVYSGHQSVLVPPLELESNVSLWLSAVSQYKARVTFCSYSVMEMCTKGLGAQTGVLRMKGVNLSCVRTCMVVAEERPRIALTQSFSKLFKDLGLPARAVSTTFGCRVNVAICLQGTAGPDPTTVYVDMRALRHDRVRLVERGSPHSLPLMESGKILPGVKVIIAHTETKGPLGDSHLGEIWVSSPHNATGYYTVYGEEALHADHFSARLSFGDTQTIWARTGYLGFLRRTELTDASGGRHDALYVVGSLDETLELRGMRYHPIDIETSVIRAHRSIAECAVFTWTNLLVVVVELDGLEQDALDLVALVTNVVLEEHYLVVGVVVIVDPGVIPINSRGEKQRMHLRDGFLADQLDPIYVAYNM

SEQ ID NO: 18540 - protein, 49 aa, Artificial Sequence
  Synthetic polypeptide
RGVVAHACNPSTSGGRGGWITRSRDGDHPGQRDVARGHKRLMPLHKAAV

SEQ ID NO: 18541 - protein, 165 aa, Artificial Sequence
  Synthetic polypeptide
GGAWWLTPVIPALREAEAGGSQDQEMETILANVCLLGTPISAGAPAGAGEQRVPVAVGRQPVQGPRHLLLLLCDGDVHQGPRRTDGCPQDEGGEPVMCAHVHGGRRGAAQDCADPVLLQALQGPGPAGPRRKHHVRVQGQRGHLPPGHSWPGPHNRLRGHAGTAP

SEQ ID NO: 18542 - protein, 72 aa, Artificial Sequence
  Synthetic polypeptide
RGVVAHACNPSTSGGRGGWITRSRDGDHPGQRVSTRDTNQCWCPRWSWRATCPCGCRPSASTRPASPSAPTL

SEQ ID NO: 18543 - protein, 385 aa, Artificial Sequence
  Synthetic polypeptide
SQHFGRPRRVDHKIKRWRPSWPTCVYSGHQSVLVPPLELESNVSLWLSAVSQYKARVTFCSYSVMEMCTKGLGAQTGVLRMKGVNLSCVRTCMVVAEERPRIALTQSFSKLFKDLGLPARAVSTTFGCRVNVAICLQGTAGPDPTTVYVDMRALRHDRVRLVERGSPHSLPLMESGKILPGVKVIIAHTETKGPLGDSHLGEIWVSSPHNATGYYTVYGEEALHADHFSARLSFGDTQTIWARTGYLGFLRRTELTDASGGRHDALYVVGSLDETLELRGMRYHPIDIETSVIRAHRSIAECAVFTWTNLLVVVVELDGLEQDALDLVALVTNVVLEEHYLVVGVVVIVDPGVIPINSRGEKQRMHLRDGFLADQLDPIYVAYNM

SEQ ID NO: 18544 - protein, 372 aa, Artificial Sequence
  Synthetic polypeptide
KYKKLAGHGGSVYSGHQSVLVPPLELESNVSLWLSAVSQYKARVTFCSYSVMEMCTKGLGAQTGVLRMKGVNLSCVRTCMVVAEERPRIALTQSFSKLFKDLGLPARAVSTTFGCRVNVAICLQGTAGPDPTTVYVDMRALRHDRVRLVERGSPHSLPLMESGKILPGVKVIIAHTETKGPLGDSHLGEIWVSSPHNATGYYTVYGEEALHADHFSARLSFGDTQTIWARTGYLGFLRRTELTDASGGRHDALYVVGSLDETLELRGMRYHPIDIETSVIRAHRSIAECAVFTWTNLLVVVVELDGLEQDALDLVALVTNVVLEEHYLVVGVVVIVDPGVIPINSRGEKQRMHLRDGFLADQLDPIYVAYNM

SEQ ID NO: 18545 - protein, 45 aa, Artificial Sequence
  Synthetic polypeptide
LGMVAVSTRDTNQCWCPRWSWRATCPCGCRPSASTRPASPSAPTL

SEQ ID NO: 18546 - protein, 182 aa, Artificial Sequence
  Synthetic polypeptide
RGVVAHACNPSTSGGRGGWITRSRDGDHPGQRGETPSLLKIQKISWAWWQCLLGTPISAGAPAGAGEQRVPVAVGRQPVQGPRHLLLLLCDGDVHQGPRRTDGCPQDEGGEPVMCAHVHGGRRGAAQDCADPVLLQALQGPGPAGPRRKHHVRVQGQRGHLPPGHSWPGPHNRLRGHAGTAP

SEQ ID NO: 18547 - protein, 56 aa, Artificial Sequence
  Synthetic polypeptide
GQAQWLMPVILTFWDAEAGGSLEPRNSSQPEQYRISEQTSELGIGTVPAHGAGHGH

SEQ ID NO: 18548 - protein, 1043 aa, Artificial Sequence
  Synthetic polypeptide
HFGMLRREDHLSPGIQANLSNIEYLNKHQNWVSGLSQHTGLAMATESILHFAGYNKQNTTLGATQLSERPACVKKDYSNFMASLNLRNRYAGEVYGMIRFSGTTGQMSDLNKMMVQDLHSALDRSHPQHYTQAMFKLTAMLISSKDCDPQLLHHLCWGPLRMFNEHGMETALACWEWLLAGKDGVEVPFMREMAGAWHMTVEQKFGLFSAEIKEADPLAASEASQPKPCPPEVTPHYIWIDFLVQRFEIAKYCSSDQVEIFSSLLQRSMSLNIGGAKGSMNRHVAAIGPRFKLLTLGLSLLHADVVPNATIRNVLREKIYSTAFDYFSCPPKFPTQGEKRLREDISIMIKFWTAMFSDKKYLTASQLVPPDNQDTRSNLDITVGSRQQATQGWINTYPLSSGMSTISKKSGMSKKTNRGSQLHKYYMKRRTLLLSLLATEIERLITWYNPLSAPELELDQAGENSVANWRSKYISLSEKQWKDNVNLAWSISPYLAVQLPARFKNTEAIGNEVTRLVRLDPGAVSDVPEAIKFLVTWHTIDADAPELSHVLCWAPTDPPTGLSYFSSMYPPHPLTAQYGVKVLRSFPPDAILFYIPQIVQALRYDKMGYVREYILWAASKSQLLAHQFIWNMKTNIYLDEEGHQKDPDIGDLLDQLVEEITGSLSGPAKDFYQREFDFFNKITNVSAIIKPYPKGDERKKACLSALSEVKVQPGCYLPSNPEAIVLDIDYKSGTPMQSAAKAPYLAKFKVKRCGVSELEKEGLRCRSDSEDECSTQEADGQKISWQAAIFKVGDDCRQDMLALQIIDLFKNIFQLVGLDLFVFPYRVVATAPGCGVIECIPDCTSRDQLGRQTDFGMYDYFTRQYGDESTLAFQQARYNFIRSMAAYSLLLFLLQIKDRHNGNIMLDKKGHIIHIDFGFMFESSPGGNLGWEPDIKLTDEMVMIMGGKMEATPFKWFMEMCVRGYLAVRPYMDAVVSLVTLMLDTGLPCFRGQTIKLLKHRFSPNMTEREAANFIMKVIQSCFLSNRSRTYDMIQYYQNDIPY

SEQ ID NO: 18549 - protein, 13 aa, Artificial Sequence
  Synthetic polypeptide
NPISTKNTKISQG

SEQ ID NO: 18550 - protein, 1173 aa, Artificial Sequence
  Synthetic polypeptide
PGMMQCVIAVADKVFDAFLNMMADKAKTKENEEELERHAQFLLVNFNHIHKRIRRVADKYLSGLVDKFPHLLWSGTVLKTMLDILQTLSLSLSADIHKDQPYYDIPDAPYRITVPDTYEARESIVKDFAARCGMILQEAMKWAPTVTKSHLQEYLNKHQNWVSGLSQHTGLAMATESILHFAGYNKQNTTLGATQLSERPACVKKDYSNFMASLNLRNRYAGEVYGMIRFSGTTGQMSDLNKMMVQDLHSALDRSHPQHYTQAMFKLTAMLISSKDCDPQLLHHLCWGPLRMFNEHGMETALACWEWLLAGKDGVEVPFMREMAGAWHMTVEQKFGLFSAEIKEADPLAASEASQPKPCPPEVTPHYIWIDFLVQRFEIAKYCSSDQVEIFSSLLQRSMSLNIGGAKGSMNRHVAAIGPRFKLLTLGLSLLHADVVPNATIRNVLREKIYSTAFDYFSCPPKFPTQGEKRLREDISIMIKFWTAMFSDKKYLTASQLVPPDNQDTRSNLDITVGSRQQATQGWINTYPLSSGMSTISKKSGMSKKTNRGSQLHKYYMKRRTLLLSLLATEIERLITWYNPLSAPELELDQAGENSVANWRSKYISLSEKQWKDNVNLAWSISPYLAVQLPARFKNTEAIGNEVTRLVRLDPGAVSDVPEAIKFLVTWHTIDADAPELSHVLCWAPTDPPTGLSYFSSMYPPHPLTAQYGVKVLRSFPPDAILFYIPQIVQALRYDKMGYVREYILWAASKSQLLAHQFIWNMKTNIYLDEEGHQKDPDIGDLLDQLVEEITGSLSGPAKDFYQREFDFFNKITNVSAIIKPYPKGDERKKACLSALSEVKVQPGCYLPSNPEAIVLDIDYKSGTPMQSAAKAPYLAKFKVKRCGVSELEKEGLRCRSDSEDECSTQEADGQKISWQAAIFKVGDDCRQDMLALQIIDLFKNIFQLVGLDLFVFPYRVVATAPGCGVIECIPDCTSRDQLGRQTDFGMYDYFTRQYGDESTLAFQQARYNFIRSMAAYSLLLFLLQIKDRHNGNIMLDKKGHIIHIDFGFMFESSPGGNLGWEPDIKLTDEMVMIMGGKMEATPFKWFMEMCVRGYLAVRPYMDAVVSLVTLMLDTGLPCFRGQTIKLLKHRFSPNMTEREAANFIMKVIQSCFLSNRSRTYDMIQYYQNDIPY

SEQ ID NO: 18551 - protein, 60 aa, Artificial Sequence
  Synthetic polypeptide
SQHSGRLKWVDHLMSGVRDQPGQHDETPSLLKIQKLARDDAVCDCSRGQSIRCLPEHDGG

SEQ ID NO: 18552 - protein, 1336 aa, Artificial Sequence
  Synthetic polypeptide
GLIRTSCLTMLTRRLPPIKEAKPRLQKLFRDFWLYSVLMGFAVEGSGLWPEEWYEGVCEIATKSPLLTFPSKEPLRSVLQYNSAMKNDTVTPAELSELRSTIINLLDPPPEVSALINKLDFAMSTYLLSVYRLEYMRVLRSTDPDRFQVMFCYFEDKAIQKDKSGMMQCVIAVADKVFDAFLNMMADKAKTKENEEELERHAQFLLVNFNHIHKRIRRVADKYLSGLVDKFPHLLWSGTVLKTMLDILQTLSLSLSADIHKDQPYYDIPDAPYRITVPDTYEARESIVKDFAARCGMILQEAMKWAPTVTKSHLQEYLNKHQNWVSGLSQHTGLAMATESILHFAGYNKQNTTLGATQLSERPACVKKDYSNFMASLNLRNRYAGEVYGMIRFSGTTGQMSDLNKMMVQDLHSALDRSHPQHYTQAMFKLTAMLISSKDCDPQLLHHLCWGPLRMFNEHGMETALACWEWLLAGKDGVEVPFMREMAGAWHMTVEQKFGLFSAEIKEADPLAASEASQPKPCPPEVTPHYIWIDFLVQRFEIAKYCSSDQVEIFSSLLQRSMSLNIGGAKGSMNRHVAAIGPRFKLLTLGLSLLHADVVPNATIRNVLREKIYSTAFDYFSCPPKFPTQGEKRLREDISIMIKFWTAMFSDKKYLTASQLVPPDNQDTRSNLDITVGSRQQATQGWINTYPLSSGMSTISKKSGMSKKTNRGSQLHKYYMKRRTLLLSLLATEIERLITWYNPLSAPELELDQAGENSVANWRSKYISLSEKQWKDNVNLAWSISPYLAVQLPARFKNTEAIGNEVTRLVRLDPGAVSDVPEAIKFLVTWHTIDADAPELSHVLCWAPTDPPTGLSYFSSMYPPHPLTAQYGVKVLRSFPPDAILFYIPQIVQALRYDKMGYVREYILWAASKSQLLAHQFIWNMKTNIYLDEEGHQKDPDIGDLLDQLVEEITGSLSGPAKDFYQREFDFFNKITNVSAIIKPYPKGDERKKACLSALSEVKVQPGCYLPSNPEAIVLDIDYKSGTPMQSAAKAPYLAKFKVKRCGVSELEKEGLRCRSDSEDECSTQEADGQKISWQAAIFKVGDDCRQDMLALQIIDLFKNIFQLVGLDLFVFPYRVVATAPGCGVIECIPDCTSRDQLGRQTDFGMYDYFTRQYGDESTLAFQQARYNFIRSMAAYSLLLFLLQIKDRHNGNIMLDKKGHIIHIDFGFMFESSPGGNLGWEPDIKLTDEMVMIMGGKMEATPFKWFMEMCVRGYLAVRPYMDAVVSLVTLMLDTGLPCFRGQTIKLLKHRFSPNMTEREAANFIMKVIQSCFLSNRSRTYDMIQYYQNDIPY

SEQ ID NO: 18553 - protein, 15 aa, Artificial Sequence
  Synthetic polypeptide
LFDHAHPTTATHQRS

SEQ ID NO: 18554 - protein, 29 aa, Artificial Sequence
  Synthetic polypeptide
PCSPDDCHPSKKLSLGYRSSSETSGCIPF

SEQ ID NO: 18555 - protein, 71 aa, Artificial Sequence
  Synthetic polypeptide
DFRGAFAGFACPLGDVPGLGDSRQRIPLQVCYPMPDRNLASIWALQQHGRVSPLKALSQNPSSFPPCPGRA

SEQ ID NO: 18556 - protein, 1989 aa, Artificial Sequence
  Synthetic polypeptide
MLWTSTFPDILDQLYGLRAKWFGGFAELPEGLSQRVISEILEVLLQVLHVLLGMCQALEIQDKEYLCKYAIPCLIGISRAFGRYSNMEESLLSKLFPKIPPHSLRVLEELEGVRRRSFNDFRSILPSNLLTVCQEGTLKRKTSSVSSISQVSPERGMPPPSSPGGSAFHYFEASCLPDGTALEPEYYFSTISSSFSVSPLFNGVTYKEFNIPLEMLRELLNLVKKIVEEAVLKSLDAIVASVMEANPSADLYYTSFSDPLYLTMFKMLRDTLYYMKDLPTSFVKEIHDFVLEQFNTSQGELQKILHDADRIHNELSPLKLRCQANAACVDLMVWAVKDEQGAENLCIKLSEKLQSKTSSKVIIAHLPLLICCLQGLGRLCERFPVVVHSVTPSLRDFLVIPSPVLVKLYKYHSQYHTVAGNDIKISVTNEHSESTLNVMSGKKSQPSMYEQLRDIAIDNICRCLKAGLTVDPVIVEAFLASLSNRLYISQESDKDAHLIPDHTIRALGHIAVALRDTPKVMEPILQILQQKFCQPPSPLDVLIIDQLGCLVITGNQYIYQEVWNLFQQISVKASSVVYSATKDYKDHGYRHCSLAVINALANIAANIQDEHLVDELLMNLLELFVQLGLEGKRASERASEKGPALKASSSAGNLGVLIPVIAVLTRRLPPIKEAKPRLQKLFRDFWLYSVLMGFAVEGSGLWPEEWYEGVCEIATKSPLLTFPSKEPLRSVLQYNSAMKNDTVTPAELSELRSTIINLLDPPPEVSALINKLDFAMSTYLLSVYRLEYMRVLRSTDPDRFQVMFCYFEDKAIQKDKSGMMQCVIAVADKVFDAFLNMMADKAKTKENEEELERHAQFLLVNFNHIHKRIRRVADKYLSGLVDKFPHLLWSGTVLKTMLDILQTLSLSLSADIHKDQPYYDIPDAPYRITVPDTYEARESIVKDFAARCGMILQEAMKWAPTVTKSHLQEYLNKHQNWVSGLSQHTGLAMATESILHFAGYNKQNTTLGATQLSERPACVKKDYSNFMASLNLRNRYAGEVYGMIRFSGTTGQMSDLNKMMVQDLHSALDRSHPQHYTQAMFKLTAMLISSKDCDPQLLHHLCWGPLRMFNEHGMETALACWEWLLAGKDGVEVPFMREMAGAWHMTVEQKFGLFSAEIKEADPLAASEASQPKPCPPEVTPHYIWIDFLVQRFEIAKYCSSDQVEIFSSLLQRSMSLNIGGAKGSMNRHVAAIGPRFKLLTLGLSLLHADVVPNATIRNVLREKIYSTAFDYFSCPPKFPTQGEKRLREDISIMIKFWTAMFSDKKYLTASQLVPPDNQDTRSNLDITVGSRQQATQGWINTYPLSSGMSTISKKSGMSKKTNRGSQLHKYYMKRRTLLLSLLATEIERLITWYNPLSAPELELDQAGENSVANWRSKYISLSEKQWKDNVNLAWSISPYLAVQLPARFKNTEAIGNEVTRLVRLDPGAVSDVPEAIKFLVTWHTIDADAPELSHVLCWAPTDPPTGLSYFSSMYPPHPLTAQYGVKVLRSFPPDAILFYIPQIVQALRYDKMGYVREYILWAASKSQLLAHQFIWNMKTNIYLDEEGHQKDPDIGDLLDQLVEEITGSLSGPAKDFYQREFDFFNKITNVSAIIKPYPKGDERKKACLSALSEVKVQPGCYLPSNPEAIVLDIDYKSGTPMQSAAKAPYLAKFKVKRCGVSELEKEGLRCRSDSEDECSTQEADGQKISWQAAIFKVGDDCRQDMLALQIIDLFKNIFQLVGLDLFVFPYRVVATAPGCGVIECIPDCTSRDQLGRQTDFGMYDYFTRQYGDESTLAFQQARYNFIRSMAAYSLLLFLLQIKDRHNGNIMLDKKGHIIHIDFGFMFESSPGGNLGWEPDIKLTDEMVMIMGGKMEATPFKWFMEMCVRGYLAVRPYMDAVVSLVTLMLDTGLPCFRGQTIKLLKHRFSPNMTEREAANFIMKVIQSCFLSNRSRTYDMIQYYQNDIPY

SEQ ID NO: 18557 - protein, 4 aa, Artificial Sequence
  Synthetic polypeptide
SVRF

SEQ ID NO: 18558 - protein, 49 aa, Artificial Sequence
  Synthetic polypeptide
GQARWLMPIIPALWEAEAGGSRASSRFAPVPTWTRSIPSLDGLLGALTY

SEQ ID NO: 18559 - protein, 152 aa, Artificial Sequence
  Synthetic polypeptide
PGAVAHAYNPSTLGGRGRRITSFITFRSCAYLDKKHTIFGRVVGGFDVLTAMENVESDPKTDRPKEEIRIDATTVFVDPYEEADAQIAQERKTQLKEASSRGRALNQCHCPHVQEEAQSGFWGLQLLVAAATCRLYLCPSFSHQSLMLKLQA

SEQ ID NO: 18560 - protein, 169 aa, Artificial Sequence
  Synthetic polypeptide
PGAVAHAYNPSTLGGRGRRITSFITFRSCAYLDKKHTIFGRVVGGFDVLTAMENVESDPKTDRPKEEIRIDATTVFVDPYEEADAQIAQERKTQLKVAPETKVKSSQPQAGSQGPQTFRQGVGKYINPAATEQQRKSPQPVPLSPCPRRSPVGVLGTSAPGSSRLPDDH

SEQ ID NO: 18561 - protein, 162 aa, Artificial Sequence
  Synthetic polypeptide
PGAVAHAYNPSTLGGRGRRITSFITFRSCAYLDKKHTIFGRVVGGFDVLTAMENVESDPKTDRPKEEIRIDATTVFVDPYEEADAQIAQERKTQLKVAPETKVKSSQPQAGSQGPQTFRQGVGKYINPAATKRAAEEEPSTSATVPMSKKKPSRGFGDFSSW

SEQ ID NO: 18562 - protein, 37 aa, Artificial Sequence
  Synthetic polypeptide
SQHFGRPRQADHELHHVSLLCLPGQEAYHLWTGCWGL

SEQ ID NO: 18563 - protein, 57 aa, Artificial Sequence
  Synthetic polypeptide
GQARWLMPIIPALWEAEAGGSRGQEIETILANTLHHVSLLCLPGQEAYHLWTGCWGL

SEQ ID NO: 18564 - protein, 28 aa, Artificial Sequence
  Synthetic polypeptide
HASSRFAPVPTWTRSIPSLDGLLGALTY

SEQ ID NO: 18565 - protein, 154 aa, Artificial Sequence
  Synthetic polypeptide
SQHFGRPRQADHEVRRSRPSSLTRFITFRSCAYLDKKHTIFGRVVGGFDVLTAMENVESDPKTDRPKEEIRIDATTVFVDPYEEADAQIAQERKTQLKEASSRGRALNQCHCPHVQEEAQSGFWGLQLLVAAATCRLYLCPSFSHQSLMLKLQA

SEQ ID NO: 18566 - protein, 171 aa, Artificial Sequence
  Synthetic polypeptide
SQHFGRPRQADHEVRRSRPSSLTRFITFRSCAYLDKKHTIFGRVVGGFDVLTAMENVESDPKTDRPKEEIRIDATTVFVDPYEEADAQIAQERKTQLKVAPETKVKSSQPQAGSQGPQTFRQGVGKYINPAATEQQRKSPQPVPLSPCPRRSPVGVLGTSAPGSSRLPDDH

SEQ ID NO: 18567 - protein, 164 aa, Artificial Sequence
  Synthetic polypeptide
SQHFGRPRQADHEVRRSRPSSLTRFITFRSCAYLDKKHTIFGRVVGGFDVLTAMENVESDPKTDRPKEEIRIDATTVFVDPYEEADAQIAQERKTQLKVAPETKVKSSQPQAGSQGPQTFRQGVGKYINPAATKRAAEEEPSTSATVPMSKKKPSRGFGDFSSW

SEQ ID NO: 18568 - protein, 18 aa, Artificial Sequence
  Synthetic polypeptide
FKISSIQDGFHSEPIHQH

SEQ ID NO: 18569 - protein, 38 aa, Artificial Sequence
  Synthetic polypeptide
FKISSIQDGFHSEPIHQHECVDKPTETCGAGRAEPAEG

SEQ ID NO: 18570 - protein, 18 aa, Artificial Sequence
  Synthetic polypeptide
SRYLVYKMGSIQSRYISM

SEQ ID NO: 18571 - protein, 87 aa, Artificial Sequence
  Synthetic polypeptide
SRYLVYKMGSIQSRYISMSVWTSPRRLVELAGQSLLKDEALAIAALELLPRELFPPLFMAAFDGRHSQTLKAMVQAWPFTCLPLGVL

SEQ ID NO: 18572 - protein, 116 aa, Artificial Sequence
  Synthetic polypeptide
SRYLVYKMGSIQSRYISMSVWTSPRRLVELAGQSLLKDEALAIAALELLPRELFPPLFMAAFDGRHSQTLKAMVQAWPFTCLPLGVLMKGQHLHLETFKAVLDGLDVLLAQEVRPR

SEQ ID NO: 18573 - protein, 153 aa, Artificial Sequence
  Synthetic polypeptide
SRYLVYKMGSIQSRYISMSVWTSPRRLVELAGQSLLKDEALAIAALELLPRELFPPLFMAAFDGRHSQTLKAMVQAWPFTCLPLGVLMKGQHLHLETFKAVLDGLDVLLAQEVRPRRWKLQVLDLRKNSHQDFWTVWSGNRASLYSFPEPEAA

SEQ ID NO: 18574 - protein, 166 aa, Artificial Sequence
  Synthetic polypeptide
SRYLVYKMGSIQSRYISMSVWTSPRRLVELAGQSLLKDEALAIAALELLPRELFPPLFMAAFDGRHSQTLKAMVQAWPFTCLPLGVLMKGQHLHLETFKAVLDGLDVLLAQEVRPRRWKLQVLDLRKNSHQDFWTVWSGNRASLYSFPEPEAAQPMTKKRKVDGLS

SEQ ID NO: 18575 - protein, 202 aa, Artificial Sequence
  Synthetic polypeptide
SRYLVYKMGSIQSRYISMSVWTSPRRLVELAGQSLLKDEALAIAALELLPRELFPPLFMAAFDGRHSQTLKAMVQAWPFTCLPLGVLMKGQHLHLETFKAVLDGLDVLLAQEVRPRRWKLQVLDLRKNSHQDFWTVWSGNRASLYSFPEPEAAQPMTKKRKVDGLSTEAEQPFIPVEVLVDLFLKEGACDELFSYLIEKVKR

SEQ ID NO: 18576 - protein, 510 aa, Artificial Sequence
  Synthetic polypeptide
SRYLVYKMGSIQSRYISMSVWTSPRRLVELAGQSLLKDEALAIAALELLPRELFPPLFMAAFDGRHSQTLKAMVQAWPFTCLPLGVLMKGQHLHLETFKAVLDGLDVLLAQEVRPRRWKLQVLDLRKNSHQDFWTVWSGNRASLYSFPEPEAAQPMTKKRKVDGLSTEAEQPFIPVEVLVDLFLKEGACDELFSYLIEKVKRKKNVLRLCCKKLKIFAMPMQDIKMILKMVQLDSIEDLEVTCTWKLPTLAKFSPYLGQMINLRRLLLSHIHASSYISPEKEEQYIAQFTSQFLSLQCLQALYVDSLFFLRGRLDQLLRHVMNPLETLSITNCRLSEGDVMHLSQSPSVSQLSVLSLSGVMLTDVSPEPLQALLERASATLQDLVFDECGITDDQLLALLPSLSHCSQLTTLSFYGNSISISALQSLLQHLIGLSNLTHVLYPVPLESYEDIHGTLHLERLAYLHARLRELLCELGRPSMVWLSANPCPHCGDRTFYDPEPILCPCFMPN

SEQ ID NO: 18577 - protein, 13 aa, Artificial Sequence
  Synthetic polypeptide
YTRWVPFRADTSA

SEQ ID NO: 18578 - protein, 40 aa, Artificial Sequence
  Synthetic polypeptide
EKRGGNFKCWIYGRTLIRTSGLYGLETGPVCTHFQSQKQL

SEQ ID NO: 18579 - protein, 42 aa, Artificial Sequence
  Synthetic polypeptide
EKRGGNFKCWIYGRTLIRTSGLYGLETGPVCTHFQSQKQLSP

SEQ ID NO: 18580 - protein, 40 aa, Artificial Sequence
  Synthetic polypeptide
KNEVETSSAGFTEELSSGLLDCMVWKQGQSVLISRARSSS

SEQ ID NO: 18581 - protein, 52 aa, Artificial Sequence
  Synthetic polypeptide
KNEVETSSAGFTEELSSGLLDCMVWKQGQSVLISRARSSSAHDKEAKSRWFE

SEQ ID NO: 18582 - protein, 75 aa, Artificial Sequence
  Synthetic polypeptide
KNEVETSSAGFTEELSSGLLDCMVWKQGQSVLISRARSSSAHDKEAKSRWFEHRGRAALHSSRGARRPVPQGRCL

SEQ ID NO: 18583 - protein, 39 aa, Artificial Sequence
  Synthetic polypeptide
KTRWKLQVLDLRKNSHQDFWTVWSGNRASLYSFPEPEAA

SEQ ID NO: 18584 - protein, 52 aa, Artificial Sequence
  Synthetic polypeptide
KTRWKLQVLDLRKNSHQDFWTVWSGNRASLYSFPEPEAAQPMTKKRKVDGLS

SEQ ID NO: 18585 - protein, 88 aa, Artificial Sequence
  Synthetic polypeptide
KTRWKLQVLDLRKNSHQDFWTVWSGNRASLYSFPEPEAAQPMTKKRKVDGLSTEAEQPFIPVEVLVDLFLKEGACDELFSYLIEKVKR

SEQ ID NO: 18586 - protein, 396 aa, Artificial Sequence
  Synthetic polypeptide
KTRWKLQVLDLRKNSHQDFWTVWSGNRASLYSFPEPEAAQPMTKKRKVDGLSTEAEQPFIPVEVLVDLFLKEGACDELFSYLIEKVKRKKNVLRLCCKKLKIFAMPMQDIKMILKMVQLDSIEDLEVTCTWKLPTLAKFSPYLGQMINLRRLLLSHIHASSYISPEKEEQYIAQFTSQFLSLQCLQALYVDSLFFLRGRLDQLLRHVMNPLETLSITNCRLSEGDVMHLSQSPSVSQLSVLSLSGVMLTDVSPEPLQALLERASATLQDLVFDECGITDDQLLALLPSLSHCSQLTTLSFYGNSISISALQSLLQHLIGLSNLTHVLYPVPLESYEDIHGTLHLERLAYLHARLRELLCELGRPSMVWLSANPCPHCGDRTFYDPEPILCPCFMPN

SEQ ID NO: 18587 - protein, 12 aa, Artificial Sequence
  Synthetic polypeptide
ACREKTRFCGFF

SEQ ID NO: 18588 - protein, 28 aa, Artificial Sequence
  Synthetic polypeptide
EEEICTHRNEAPEVSVQRKDQVLWFLLS

SEQ ID NO: 18589 - protein, 108 aa, Artificial Sequence
  Synthetic polypeptide
GTRGERAEKRPGSVVSSELTQDPAVSVALGQTVRITCQGDSLRSYYASWYQQKPGQAPVLVIYGKNNRPSGIPDRFSGSSSGNTASLTITGAQAEDEADYYCNSRDSS

SEQ ID NO: 18590 - protein, 18 aa, Artificial Sequence
  Synthetic polypeptide
LHCQSAITQVKVLWPPMS

SEQ ID NO: 18591 - protein, 6 aa, Artificial Sequence
  Synthetic polypeptide
RFCGLL

SEQ ID NO: 18592 - protein, 110 aa, Artificial Sequence
  Synthetic polypeptide
SLPISHYTGEGSVASYELTQPLSVSVALGQTARITCGGNNIGSKNVHWYQQKPGQAPVLVIYRDSNRPSGIPERFSGSNSGNTATLTISRAQAGDEADYYCQVWDSSTAH

SEQ ID NO: 18593 - protein, 855 aa, Artificial Sequence
  Synthetic polypeptide
ISVTISFLICKTGIMITLKMHPLGLCNNNDEEDLYEYGWVGVVKLEQPELDPKPCLTVLGKAKRAVQRGATAVIFDVSENPEAIDQLNQGSEDPLKRPVVYVKGADAIKLMNIVNKQKVARARIQHRPPRQPTEYFDMGIFLAFFVVVSLVCLILLVKIKLKQRRSQNSMNRLAVQALEKMETRKFNSKSKGRREGSCGALDTLSSSSTSDCAICLEKYIDGEELRVIPCTHRFHRKCVDPWLLQHHTCPHCRHNIIEQKGNPSAVCVETSNLSRGRQQRVTLPVHYPGRVHRTNAIPAYPTRTSMDSHGNPVTLLTMDRHGEQSLYSPQTPAYIRSYPPLHLDHSLAAHRCGLEHRAYSPAHPFRRPKLSGRSFSKAACFSQYETMYQHYYFQGLSYPEQEGQSPPSLAPRGPARAFPPSGSGSLLFPTVVHVAPPSHLESGSTSSFSCYHGHRSVCSGYLADCPGSDSSSSSSSGQCHCSSSDSVVDCTEVSNQGVYGSCSTFRSSLSSDYDPFIYRSRSPCRASEAGGSGSSGRGPALCFEGSPPPEELPAVHSHGAGRGEPWPGPASPSGDQVSTCSLEMNYSSNSSLEHRGPNSSTSEVGLEASPGAAPDLRRTWKGGHELPSCACCCEPQPSPAGPSAGAAGSSTLFLGPHLYEGSGPAGGEPQSGSSQGLYGLHPDHLPRTDGVKYEGLPCCFYEEKQVARGGGGGSGCYTEDYSVSVQYTLTEEPPPGCYPGARDLSQRIPIIPEDVDCDLGLPSDCQGTHSLGSWGGTRGPDTPRPHRGLGATREEERALCCQARALLRPGCPPEEAGAVRANFPSALQDTQESSTTATEAAGPRSHSADSSSPGA

SEQ ID NO: 18594 - protein, 15 aa, Artificial Sequence
  Synthetic polypeptide
NWHHDNFEDAPTGPM

SEQ ID NO: 18595 - protein, 21 aa, Artificial Sequence
  Synthetic polypeptide
RCTHWAYVITMTKRTCMNMAG

SEQ ID NO: 18596 - protein, 22 aa, Artificial Sequence
  Synthetic polypeptide
CSTQLPLLPPNLKQSDAPTGPM

SEQ ID NO: 18597 - protein, 839 aa, Artificial Sequence
  Synthetic polypeptide
NNLMHPLGLCNNNDEEDLYEYGWVGVVKLEQPELDPKPCLTVLGKAKRAVQRGATAVIFDVSENPEAIDQLNQGSEDPLKRPVVYVKGADAIKLMNIVNKQKVARARIQHRPPRQPTEYFDMGIFLAFFVVVSLVCLILLVKIKLKQRRSQNSMNRLAVQALEKMETRKFNSKSKGRREGSCGALDTLSSSSTSDCAICLEKYIDGEELRVIPCTHRFHRKCVDPWLLQHHTCPHCRHNIIEQKGNPSAVCVETSNLSRGRQQRVTLPVHYPGRVHRTNAIPAYPTRTSMDSHGNPVTLLTMDRHGEQSLYSPQTPAYIRSYPPLHLDHSLAAHRCGLEHRAYSPAHPFRRPKLSGRSFSKAACFSQYETMYQHYYFQGLSYPEQEGQSPPSLAPRGPARAFPPSGSGSLLFPTVVHVAPPSHLESGSTSSFSCYHGHRSVCSGYLADCPGSDSSSSSSSGQCHCSSSDSVVDCTEVSNQGVYGSCSTFRSSLSSDYDPFIYRSRSPCRASEAGGSGSSGRGPALCFEGSPPPEELPAVHSHGAGRGEPWPGPASPSGDQVSTCSLEMNYSSNSSLEHRGPNSSTSEVGLEASPGAAPDLRRTWKGGHELPSCACCCEPQPSPAGPSAGAAGSSTLFLGPHLYEGSGPAGGEPQSGSSQGLYGLHPDHLPRTDGVKYEGLPCCFYEEKQVARGGGGGSGCYTEDYSVSVQYTLTEEPPPGCYPGARDLSQRIPIIPEDVDCDLGLPSDCQGTHSLGSWGGTRGPDTPRPHRGLGATREEERALCCQARALLRPGCPPEEAGAVRANFPSALQDTQESSTTATEAAGPRSHSADSSSPGA

SEQ ID NO: 18598 - protein, 71 aa, Artificial Sequence
  Synthetic polypeptide
PLSLLGWSQAMLASVETILITGSTGRQPVPNATASASGITPNPVVAMAGSSSLIGLGGHGGASGWLHPPCP

SEQ ID NO: 18599 - protein, 124 aa, Artificial Sequence
  Synthetic polypeptide
PLSLLGWSQAMLASVETILITGSTGRQPVPNATASASGITPNPVVAMAGSSSLILSWAPAVGTTQPCLLWSIPLTSPTPMPRGGSATGPSGFRGPPTSTSASPYLTSGTRRTWWSFWMATPTVS

SEQ ID NO: 18600 - protein, 75 aa, Artificial Sequence; identical to SEQ ID NO: 4073
  Synthetic polypeptide

SEQ ID NO: 18601 - protein, 340 aa, Artificial Sequence; identical to SEQ ID NO: 2369
  Synthetic polypeptide

SEQ ID NO: 18602 - protein, 323 aa, Artificial Sequence; identical to SEQ ID NO: 2408
  Synthetic polypeptide

SEQ ID NO: 18603 - protein, 306 aa, Artificial Sequence; identical to SEQ ID NO: 2476
  Synthetic polypeptide

SEQ ID NO: 18604 - protein, 16 aa, Artificial Sequence
  Synthetic polypeptide
VCWDGVRLCLLLWKQS

SEQ ID NO: 18605 - protein, 23 aa, Artificial Sequence
  Synthetic polypeptide
CETAIQDSEVTSLIWSQGQPRSI

SEQ ID NO: 18606 - protein, 58 aa, Artificial Sequence
  Synthetic polypeptide
MSRDLMVLKVEFFPALALTLSCHLLKEVSASPFAFRHACKFPEASPANNAKLQFRTRK

SEQ ID NO: 18607 - protein, 47 aa, Artificial Sequence
  Synthetic polypeptide
RRCLLLLLPSAMLVSFLRPPQQIMRNCNSGLGSDITHLVSGAAQKYL

SEQ ID NO: 18608 - protein, 65 aa, Artificial Sequence
  Synthetic polypeptide
LGFLGFACPVVSCQEEEPPAGGWSLWHHRSPRCGWWRPWRLKTQRWSGDAEDQPRYYRRLLPRWS

SEQ ID NO: 18609 - protein, 620 aa, Artificial Sequence
  Synthetic polypeptide
RLSAGVAMLKTNRGTIGGFFLAGRDMAWWPMGASLFASNIGSNHYVGLAGTGAASGVATVTFEWTSSVMLLILGWIFVPIYIKSGVMTMPEYLKKRFGGERLQVYLSILSLFICVVLLISADIFAGAIFIKLALGLDLYLAIFILLAMTAVYTTTGGLASVIYTDTLQTIIMLIGSFILMGFAFNEVGGYESFTEKYVNATPSVVEGDNLTISASCYTPRADSFHIFRDAVTGDIPWPGIIFGMPITALWYWCTNQVIVQRCLCGKDMSHVKAACIMCAYLKLLPMFLMVMPGMISRILYTDMVACVVPSECVKHCGVDVGCTNYAYPTMVLELMPQGLRGLMLSVMLASLMSSLTSIFNSASTLFTIDLYTKMRKQASEKELLIAGRIFVLLLTVVSIVWVPLVQVSQNGQLIHYTESISSYLGPPIAAVFVLAIFCKRVNEQGAFWGLMVGLAMGLIRMITEFAYGTGSCLAPSNCPKIICGVHYLYFSIVLFFGSMLVTLGISLLTKPIPDVHLYRLCWVLRNSTEERIDIDAEEKSQEETDDGVEEDYPEKSRGCLKKAYDLFCGLQKGPKLTKEEEEALSKKLTDTSERPSWRTIVNINAILLLAVVVFIHGYYA

SEQ ID NO: 18610 - protein, 50 aa, Artificial Sequence
  Synthetic polypeptide
SRLSWLCLPSCFMPGGGAACWRLELVAPPLASLWLVAAMETKDSALEWRC

SEQ ID NO: 18611 - protein, 19 aa, Artificial Sequence
  Synthetic polypeptide
GQEVETSLGNIGDADRDTV

SEQ ID NO: 18612 - protein, 25 aa, Artificial Sequence
  Synthetic polypeptide
SQLFGRLRQEDHLRPGGRDQPGQHR

SEQ ID NO: 18613 - protein, 20 aa, Artificial Sequence
  Synthetic polypeptide
CLVVCHALRGCTTLPAGVGG

SEQ ID NO: 18614 - protein, 114 aa, Artificial Sequence
  Synthetic polypeptide
MYSLHRPCPRHGLFALASPSAKNAPSQLLGWTHGSCSVGLSCSHSEPQHPPCGQDTAPLALGCRGSVSTSVSPPDCRAPEGQGLGPSLLCVPDAWWCATLSVGARLFQLELEAD

SEQ ID NO: 18615 - protein, 841 aa, Artificial Sequence
  Synthetic polypeptide
MYSLHRPCPRHGLFALASPSAKNAPSQLLGWTHGSCSVGLSCSHSEPQHPPCGQDTAPLALGCRGSVSTSVSPPDCRAPEGQGLGPSLLCVPDAWWCATLSVGARLFQLELEADALVNFHQYSSQLLPFYESSPQVLHTEVLQHLTDLIRNHPSWSVAHLAVELGIRECFHHSRIISCANCAENEEGCTPLHLACRKGDGEILVELVQYCHTQMDVTDYKGETVFHYAVQGDNSQVLQLLGRNAVAGLNQVNNQGLTPLHLACQLGKQEMVRVLLLCNARCNIMGPNGYPIHSAMKFSQKGCAEMIISMDSSQIHSKDPRYGASPLHWAKNAEMARMLLKRGCNVNSTSSAGNTALHVAVMRNRFDCAIVLLTHGANADARGEHGNTPLHLAMSKDNVEMIKALIVFGAEVDTPNDFGETPTFLASKIGRLVTRKAILTLLRTVGAEYCFPPIHGVPAEQGSAAPHHPFSLERAQPPPISLNNLELQDLMHISRARKPAFILGSMRDEKRTHDHLLCLDGGGVKGLIIIQLLIAIEKASGVATKDLFDWVAGTSTGGILALAILHSKSMAYMRGMYFRMKDEVFRGSRPYESGPLEEFLKREFGEHTKMTDVRKPKVMLTGTLSDRQPAELHLFRNYDAPETVREPRFNQNVNLRPPAQPSDQLVWRAARSSGAAPTYFRPNGRFLDGGLLANNPTLDAMTEIHEYNQDLIRKGQANKVKKLSIVVSLGTGRSPQVPVTCVDVFRPSNPWELAKTVFGAKELGKMVVDCCTDPDGRAVDRARAWCEMVGIQYFRLNPQLGTDIMLDEVSDTVLVNALWETEVYIYEHREEFQKLIQLLLSP

SEQ ID NO: 18616 - protein, 787 aa, Artificial Sequence
  Synthetic polypeptide
MYSLHRPCPRHGLFALASPSAKNAPSQLLGWTHGSCSVGLSCSHSEPQHPPCGQDTAPLALGCRGSVSTSVSPPDCRAPEGQGLGPSLLCVPDAWWCATLSVGARLFQLELEADALVNFHQYSSQLLPFYESSPQVLHTEVLQHLTDLIRNHPSWSVAHLAVELGIRECFHHSRIISCANCAENEEGCTPLHLACRKGDGEILVELVQYCHTQMDVTDYKGETVFHYAVQGDNSQVLQLLGRNAVAGLNQVNNQGLTPLHLACQLGKQEMVRVLLLCNARCNIMGPNGYPIHSAMKFSQKGCAEMIISMDSSQIHSKDPRYGASPLHWAKNAEMARMLLKRGCNVNSTSSAGNTALHVAVMRNRFDCAIVLLTHGANADARGEHGNTPLHLAMSKDNVEMIKALIVFGAEVDTPNDFGETPTFLASKIGRQLQDLMHISRARKPAFILGSMRDEKRTHDHLLCLDGGGVKGLIIIQLLIAIEKASGVATKDLFDWVAGTSTGGILALAILHSKSMAYMRGMYFRMKDEVFRGSRPYESGPLEEFLKREFGEHTKMTDVRKPKVMLTGTLSDRQPAELHLFRNYDAPETVREPRFNQNVNLRPPAQPSDQLVWRAARSSGAAPTYFRPNGRFLDGGLLANNPTLDAMTEIHEYNQDLIRKGQANKVKKLSIVVSLGTGRSPQVPVTCVDVFRPSNPWELAKTVFGAKELGKMVVDCCTDPDGRAVDRARAWCEMVGIQYFRLNPQLGTDIMLDEVSDTVLVNALWETEVYIYEHREEFQKLIQLLLSP

SEQ ID NO: 18617 - protein, 186 aa, Artificial Sequence
  Synthetic polypeptide
MYSLHRPCPRHGLFALASPSAKNAPSQLLGWTHGSCSVGLSCSHSEPQHPPCGQDTAPLALGCRGSVSTSVSPPDCRAPEGQGLGPSLLCVPDAWWCATLSVGARLFQLELEADALVNFHQYSSQLLPFYESSPQVLHTEVLQHLTDLIRNHPSWSVAHLAVELGIRECFHHSRIISSLEGTQWLA

SEQ ID NO: 18618 - protein, 53 aa, Artificial Sequence
  Synthetic polypeptide
VAVGLFPHLFPLQTAGLLRDRAWGQVSSAFLMPGGVPRSPWVHDSSSWSWRLT

SEQ ID NO: 18619 - protein, 54 aa, Artificial Sequence
  Synthetic polypeptide
VAVGLFPHLFPLQTAGLLRDRAWGQVSSAFLMPGGVPRSPWVHDSSSWSWRLTP

SEQ ID NO: 18620 - protein, 29 aa, Artificial Sequence
  Synthetic polypeptide
EFLLGIPWHPSLHWGSCFPDSSSWSWRLT

SEQ ID NO: 18621 - protein, 30 aa, Artificial Sequence
  Synthetic polypeptide
EFLLGIPWHPSLHWGSCFPDSSSWSWRLTP

SEQ ID NO: 18622 - protein, 33 aa, Artificial Sequence
  Synthetic polypeptide
PAGWIRSFCWASHGTRPCTGDPAFLTLPAGVGG

SEQ ID NO: 18623 - protein, 66 aa, Artificial Sequence
  Synthetic polypeptide
ACCFASWGRGLLFCTTGIITFIWRTVSDPHRPAHHGLPGQHSYLLQLQDHLSIHSPIQGFHSQLLS

SEQ ID NO: 18624 - protein, 52 aa, Artificial Sequence
  Synthetic polypeptide
AGWEKARTSYHWQFKCPPHRPALILGMLFCLLGPRSSLLYNWDHHIYLEDSQ

SEQ ID NO: 18625 - protein, 278 aa, Artificial Sequence
  Synthetic polypeptide
SRVGEGSDIIPLAVQMPAPQTCPDPRHVVLPPGAEVFSFVQLGSSHLSGGQSVTHTGLPIMASLANTAISFSCRITYPYTPQFKVFTVSYFHEDLQGQRSPKKPTNCHPGLGTENQSHTLDCQVTLVLPGASATGTYYCSVHWPHSTVRGSGTFILVRDAGYREPPQSPQKLLLFGFTGLLSVLSVVGTALLLWNKKRMRGPGKDPTRKCPDPRSASSPKQHPSESVYTALQRRETEVYACIENEDGSSPTAKQSPLSQERPHRFEDDGELNLVYENL

SEQ ID NO: 18626 - protein, 172 aa, Artificial Sequence
  Synthetic polypeptide
SRVGEGSDIIPLAVQMPAPQTCPDPRHVVLPPGAEVFSFVQLGSSHLSGGQSVTHTGLPIMASLANTAISFSCRITYPYTPQFKVFTVSYFHEDLQGQRSPKKPTNCHPGLGTENQSHTLDCQVTLVLPGASATGTYYCSVHWPHSTVRGSGTFILVRETRFRHVGQAGLES

SEQ ID NO: 18627 - protein, 15 aa, Artificial Sequence
  Synthetic polypeptide
GQEFETSLANMEDSQ

SEQ ID NO: 18628 - protein, 77 aa, Artificial Sequence
  Synthetic polypeptide
GRVRWLTPVVPALREAKAGRSPEVRSSRPAWPTWRTVSDPHRPAHHGLPGQHSYLLQLQDHLSIHSPIQGFHSQLLS

SEQ ID NO: 18629 - protein, 254 aa, Artificial Sequence
  Synthetic polypeptide
SQHFGRPRRADHLRSGVRDQPGQHGGQSVTHTGLPIMASLANTAISFSCRITYPYTPQFKVFTVSYFHEDLQGQRSPKKPTNCHPGLGTENQSHTLDCQVTLVLPGASATGTYYCSVHWPHSTVRGSGTFILVRDAGYREPPQSPQKLLLFGFTGLLSVLSVVGTALLLWNKKRMRGPGKDPTRKCPDPRSASSPKQHPSESVYTALQRRETEVYACIENEDGSSPTAKQSPLSQERPHRFEDDGELNLVYENL

SEQ ID NO: 18630 - protein, 148 aa, Artificial Sequence
  Synthetic polypeptide
SQHFGRPRRADHLRSGVRDQPGQHGGQSVTHTGLPIMASLANTAISFSCRITYPYTPQFKVFTVSYFHEDLQGQRSPKKPTNCHPGLGTENQSHTLDCQVTLVLPGASATGTYYCSVHWPHSTVRGSGTFILVRETRFRHVGQAGLES

SEQ ID NO: 18631 - protein, 19 aa, Artificial Sequence
  Synthetic polypeptide
ATPVFLCLRHARSGTTSGL

SEQ ID NO: 18632 - protein, 24 aa, Artificial Sequence
  Synthetic polypeptide
HTCLSVPQTCQVGNYKRTVKRIDD

SEQ ID NO: 18633 - protein, 143 aa, Artificial Sequence
  Synthetic polypeptide
HTCLSVPQTCQVGNYKRTVKRIDDGHRLCSDLMNCLHERARIEKAYAQQLTEWARRWRQLVEKGPQYGTVEKAWMAFMSEAERVSELHLEVKASLMNDDFEKIKNWQKEAFHKQMMGGFKETKEAEDGFRKAQKPWAKKLKEV

SEQ ID NO: 18634 - protein, 477 aa, Artificial Sequence
  Synthetic polypeptide
HTCLSVPQTCQVGNYKRTVKRIDDGHRLCSDLMNCLHERARIEKAYAQQLTEWARRWRQLVEKGPQYGTVEKAWMAFMSEAERVSELHLEVKASLMNDDFEKIKNWQKEAFHKQMMGGFKETKEAEDGFRKAQKPWAKKLKEVEAAKKAHHAACKEEKLAISREANSKADPSLNPEQLKKLQDKIEKCKQDVLKTKEKYEKSLKELDQGTPQYMENMEQVFEQCQQFEEKRLRFFREVLLEVQKHLDLSNVAGYKAIYHDLEQSIRAADAVEDLRWFRANHGPGMAMNWPQFEEWSADLNRTLSRREKKKATDGVTLTGINQTGDQSLPSKPSSTLNVPSNPAQSAQSQSSYNPFEDEDDTGSTVSEKDDTKAKNVSSYEKTQSYPTDWSDDESNNPFSSTDANGDSNPFDDDATSGTEVRVRALYDYEGQEHDELSFKAGDELTKMEDEDEQGWCKGRLDNGQVGLYPANYVEAIQ

SEQ ID NO: 18635 - protein, 436 aa, Artificial Sequence
  Synthetic polypeptide
HTCLSVPQTCQVGNYKRTVKRIDDGHRLCSDLMNCLHERARIEKAYAQQLTEWARRWRQLVEKGPQYGTVEKAWMAFMSEAERVSELHLEVKASLMNDDFEKIKNWQKEAFHKQMMGGFKETKEAEDGFRKAQKPWAKKLKEVEAAKKAHHAACKEEKLAISREANSKADPSLNPEQLKKLQDKIEKCKQDVLKTKEKYEKSLKELDQGTPQYMENMEQVFEQCQQFEEKRLRFFREVLLEVQKHLDLSNVAGYKAIYHDLEQSIRAADAVEDLRWFRANHGPGMAMNWPQFEEWSADLNRTLSRREKKKATDGVTLTGINQTGDQSLPSKPSSVSSYEKTQSYPTDWSDDESNNPFSSTDANGDSNPFDDDATSGTEVRVRALYDYEGQEHDELSFKAGDELTKMEDEDEQGWCKGRLDNGQVGLYPANYVEAIQ

SEQ ID NO: 18636 - protein, 146 aa, Artificial Sequence
  Synthetic polypeptide
HTCLSVPQTCQVGNYKRTVKRIDDGHRLCSDLMNCLHERARIEKAYAQQLTEWARRWRQLVEKGPQYGTVEKAWMAFMSEAERVSELHLEVKASLMNDDFEKIKNWQKEAFHKQMMGGFKETKEAEDGFRKAQKPWAKKLKEVHLS

SEQ ID NO: 18637 - protein, 24 aa, Artificial Sequence
  Synthetic polypeptide
PHLSFCASDMPGRELQADCEADRR

SEQ ID NO: 18638 - protein, 37 aa, Artificial Sequence
  Synthetic polypeptide
PHLSFCASDMPGRELQADCEADRRWPPPVQRPHELPA

SEQ ID NO: 18639 - protein, 41 aa, Artificial Sequence
  Synthetic polypeptide
FHLPLPPGVLPLGLQSGWSTPVPILLMYGRELQADCEADRR

SEQ ID NO: 18640 - protein, 54 aa, Artificial Sequence
  Synthetic polypeptide
FHLPLPPGVLPLGLQSGWSTPVPILLMYGRELQADCEADRRWPPPVQRPHELPA

SEQ ID NO: 18641 - protein, 84 aa, Artificial Sequence
  Synthetic polypeptide
GLTPAYPLSLISCHTPELLAFLPCKSCLLQMPFFPSLPAELILQNLALISPSPPSRCFAPGPAEWMVHPRPHTPHVWSGTTSGL

SEQ ID NO: 18642 - protein, 50 aa, Artificial Sequence
  Synthetic polypeptide
THPSKLGSNFTFPSLQVFCPWACRVDGPPPSPYSSCMVGNYKRTVKRIDD

SEQ ID NO: 18643 - protein, 169 aa, Artificial Sequence
  Synthetic polypeptide
THPSKLGSNFTFPSLQVFCPWACRVDGPPPSPYSSCMVGNYKRTVKRIDDGHRLCSDLMNCLHERARIEKAYAQQLTEWARRWRQLVEKGPQYGTVEKAWMAFMSEAERVSELHLEVKASLMNDDFEKIKNWQKEAFHKQMMGGFKETKEAEDGFRKAQKPWAKKLKEV

SEQ ID NO: 18644 - protein, 503 aa, Artificial Sequence
  Synthetic polypeptide
THPSKLGSNFTFPSLQVFCPWACRVDGPPPSPYSSCMVGNYKRTVKRIDDGHRLCSDLMNCLHERARIEKAYAQQLTEWARRWRQLVEKGPQYGTVEKAWMAFMSEAERVSELHLEVKASLMNDDFEKIKNWQKEAFHKQMMGGFKETKEAEDGFRKAQKPWAKKLKEVEAAKKAHHAACKEEKLAISREANSKADPSLNPEQLKKLQDKIEKCKQDVLKTKEKYEKSLKELDQGTPQYMENMEQVFEQCQQFEEKRLRFFREVLLEVQKHLDLSNVAGYKAIYHDLEQSIRAADAVEDLRWFRANHGPGMAMNWPQFEEWSADLNRTLSRREKKKATDGVTLTGINQTGDQSLPSKPSSTLNVPSNPAQSAQSQSSYNPFEDEDDTGSTVSEKDDTKAKNVSSYEKTQSYPTDWSDDESNNPFSSTDANGDSNPFDDDATSGTEVRVRALYDYEGQEHDELSFKAGDELTKMEDEDEQGWCKGRLDNGQVGLYPANYVEAIQ

SEQ ID NO: 18645 - protein, 462 aa, Artificial Sequence
  Synthetic polypeptide
THPSKLGSNFTFPSLQVFCPWACRVDGPPPSPYSSCMVGNYKRTVKRIDDGHRLCSDLMNCLHERARIEKAYAQQLTEWARRWRQLVEKGPQYGTVEKAWMAFMSEAERVSELHLEVKASLMNDDFEKIKNWQKEAFHKQMMGGFKETKEAEDGFRKAQKPWAKKLKEVEAAKKAHHAACKEEKLAISREANSKADPSLNPEQLKKLQDKIEKCKQDVLKTKEKYEKSLKELDQGTPQYMENMEQVFEQCQQFEEKRLRFFREVLLEVQKHLDLSNVAGYKAIYHDLEQSIRAADAVEDLRWFRANHGPGMAMNWPQFEEWSADLNRTLSRREKKKATDGVTLTGINQTGDQSLPSKPSSVSSYEKTQSYPTDWSDDESNNPFSSTDANGDSNPFDDDATSGTEVRVRALYDYEGQEHDELSFKAGDELTKMEDEDEQGWCKGRLDNGQVGLYPANYVEAIQ

SEQ ID NO: 18646 - protein, 172 aa, Artificial Sequence
  Synthetic polypeptide
THPSKLGSNFTFPSLQVFCPWACRVDGPPPSPYSSCMVGNYKRTVKRIDDGHRLCSDLMNCLHERARIEKAYAQQLTEWARRWRQLVEKGPQYGTVEKAWMAFMSEAERVSELHLEVKASLMNDDFEKIKNWQKEAFHKQMMGGFKETKEAEDGFRKAQKPWAKKLKEVHLS

SEQ ID NO: 18647 - protein, 22 aa, Artificial Sequence
  Synthetic polypeptide
KYKCYPVTHWPCGWPASGTRWT

SEQ ID NO: 18648 - protein, 124 aa, Artificial Sequence
  Synthetic polypeptide
PGQHGETQPLLKIQMLPSDALALRLACIGDEMDVSLRAPRLAQLSEVAMHSLGLAFIYDQTEDIRDVLRSFMDGFTTLKENIMRFWRSPNPGSWVSCEQVLLALLLLLALLLPLLSGGLHLLLK

SEQ ID NO: 18649 - protein, 44 aa, Artificial Sequence
  Synthetic polypeptide
IDRQVSFSRQDLPPGPAVLQQGRRCGELLPFLPGSHTLRARLGK

SEQ ID NO: 18650 - protein, 52 aa, Artificial Sequence
  Synthetic polypeptide
VSLLNRQASVFLAPRPPPGPSCPAARQAVWRAASFPARLTHSSCQTRKIATS

SEQ ID NO: 18651 - protein, 109 aa, Artificial Sequence
  Synthetic polypeptide
AEWSLITFVNKHLNKLNLEVTELETQFADGVYLVLLMGLLEDYFVPLHHFYLTPESFDQKVHNVSFAFELMLDGGLKKPKARPEDVVNLDLKSTLRVLYNLFTKYKNVE

SEQ ID NO: 18652 - protein, 83 aa, Artificial Sequence
  Synthetic polypeptide
HQAACLAHSSCSVNLSRMVSHHFCEQAPEQAEFGGDGTGDPVCRWRVPGSAHGPSGRLLCSSPPLLPDSGKLRSEGPQCVLRL

SEQ ID NO: 18653 - protein, 14 aa, Artificial Sequence
  Synthetic polypeptide
LLSKFEQNGLSSLL

SEQ ID NO: 18654 - protein, 154 aa, Artificial Sequence
  Synthetic polypeptide
KKPDPKEDTHTDKDEPPKDVFDELFKLAPEKVNAVKEAIVNFVNQKLDRLGLSVQNLDTQFADGVILLLLIGQLEGFFLHLKEFYLTPNSPAEMLHNVTLALELLKDEGLLSCPVSPEDIVNKDAKSTLRVLYGLFCKHTQKAHRDRTPHGAPN

SEQ ID NO: 18655 - protein, 28 aa, Artificial Sequence
  Synthetic polypeptide
KNNKNGVKEARPKRGHAHRQGRASKGRL

SEQ ID NO: 18656 - protein, 35 aa, Artificial Sequence
  Synthetic polypeptide
KWSERSQTQKRTRTQTRTSLQRTSLMNYLSWLRRK

SEQ ID NO: 18657 - protein, 44 aa, Artificial Sequence
  Synthetic polypeptide
KKPDPKEDTQYGFISMNFQDRQNQQMAREIAAVHRQGRASKGRL

SEQ ID NO: 18658 - protein, 62 aa, Artificial Sequence
  Synthetic polypeptide
KNNKNGVKEARPKRGHAVWFHFHELPGQAKPTDGKRNRSCAQTRTSLQRTSLMNYLSWLRRK

SEQ ID NO: 18659 - protein, 161 aa, Artificial Sequence
  Synthetic polypeptide
TSRTGKTNRWQEKSQLCTDKDEPPKDVFDELFKLAPEKVNAVKEAIVNFVNQKLDRLGLSVQNLDTQFADGVILLLLIGQLEGFFLHLKEFYLTPNSPAEMLHNVTLALELLKDEGLLSCPVSPEDIVNKDAKSTLRVLYGLFCKHTQKAHRDRTPHGAPN

SEQ ID NO: 18660 - protein, 36 aa, Artificial Sequence
  Synthetic polypeptide
ARRGGSRPLSQQFGRPRQADHEARQQRPWHRRFPVV

SEQ ID NO: 18661 - protein, 1529 aa, Artificial Sequence
  Synthetic polypeptide
GQARWLTPVIPAVWEAKAGRSRGETTTTVAPKVPSGVSDGRWHSVQVQYYNKPNIGHLGLPHGPSGEKMAVVTVDDCDTTMAVRFGKDIGNYSCAAQGTQTGSKKSLDLTGPLLLGGVPNLPEDFPVHNRQFVGCMRNLSVDGKNVDMAGFIANNGTREGCAARRNFCDGRRCQNGGTCVNRWNMYLCECPLRFGGKNCEQAMPHPQLFSGESVVSWSDLNIIISVPWYLGLMFRTRKEDSVLMEATSGGPTSFRLQILNNYLQFEVSHGPSDVESVMLSGLRVTDGEWHHLLIELKNVKEDSEMKHLVTMTLDYGMDQNKADIGGMLPGLTVRSVVVGGASEDKVSVRRGFRGCMQGVRMGGTPTNVATLNMNNALKVRVKDGCDVDDPCTSSPCPPNSRCHDAWEDYSCVCDKGYLGINCVDACHLNPCENMGACVRSPGSPQGYVCECGPSHYGPYCENKLDLPCPRGWWGNPVCGPCHCAVSKGFDPDCNKTNGQCQCKENYYKLLAQDTCLPCDCFPHGSHSRTCDMATGQCACKPGVIGRQCNRCDNPFAEVTTLGCEVIYNGCPKAFEAGIWWPQTKFGQPAAVPCPKGSVGNAVRHCSGEKGWLPPELFNCTTISFVDLRAMNEKLSRNETQVDGARALQLVRALRSATQHTGTLFGNDVRTAYQLLGHVLQHESWQQGFDLAATQDADFHEDVIHSGSALLAPATRAAWEQIQRSEGGTAQLLRRLEGYFSNVARNVRRTYLRPFVIVTANMILAVDIFDKFNFTGARVPRFDTIHEEFPRELESSVSFPADFFRPPEEKEGPLLRPAGRRTTPQTTRPGPGTEREAPISRRRRHPDDAGQFAVALVIIYRTLGQLLPERYDPDRRSLRLPHRPIINTPMVSTLVYSEGAPLPRPLERPVLVEFALLEVEERTKPVCVFWNHSLAVGGTGGWSARGCELLSRNRTHVACQCSHTASFAVLMDISRRENGEVLPLKIVTYAAVSLSLAALLVAFVLLSLVRMLRSNLHSIHKHLAVALFLSQLVFVIGINQTENPFLCTVVAILLHYIYMSTFAWTLVESLHVYRMLTEVRNIDTGPMRFYYVVGWGIPAIVTGLAVGLDPQGYGNPDFCWLSLQDTLIWSFAGPIGAVIIINTVTSVLSAKVSCQRKHHYYGKKGIVSLLRTAFLLLLLISATWLLGLLAVNRDALSFHYLFAIFSGLQGPFVLLFHCVLNQEVRKHLKGVLGGRKLHLEDSATTRATLLTRSLNCNTTFGDGPDMLRTDLGESTASLDSIVRDEGIQKLGVSSGLVRGSHGEPDASLMPRSCKDPPGHDSDSDSELSLDEQSSSYASSHSSDSEDDGVGAEEKWDPARGAVHSTPKGDAVANHVPAGWPDQSLAESDSEDPSGKPRLKVETKVSVELHREEQGSHRGEYPPDQESGGAARLASSQPPEQRKGILKNKVTYPPPLTLTEQTLKGRLREKLADCEQSPTSSRTSSLGSGGPDCAITVKSPGREPGRDHLNGVAMNVRTGSAQADGSDSEKP

SEQ ID NO: 18662 - protein, 37 aa, Artificial Sequence
  Synthetic polypeptide
PGAVAHARYPSSLGGQGRQITRRDNNDRGTEGSQWCE

SEQ ID NO: 18663 - protein, 43 aa, Artificial Sequence; identical to SEQ ID NO: 5548
  Synthetic polypeptide

SEQ ID NO: 18664 - protein, 249 aa, Artificial Sequence; identical to SEQ ID NO: 2667
  Synthetic polypeptide

SEQ ID NO: 18665 - protein, 249 aa, Artificial Sequence; identical to SEQ ID NO: 2668
  Synthetic polypeptide

SEQ ID NO: 18666 - protein, 1866 aa, Artificial Sequence; identical to SEQ ID NO: 1446
  Synthetic polypeptide

SEQ ID NO: 18667 - protein, 127 aa, Artificial Sequence
  Synthetic polypeptide
DREAKSRLRGHACSCRKMYGNRQLSRPGHLWLFRDAGTHDGLLVNQTELFVPSLNVDGQPIFANITLPVYTLKERCLQVVRSLVKPENYRRLDIVRSLYEDLEDHPNVQKDLERLTQERIAHQRMGD

SEQ ID NO: 18668 - protein, 39 aa, Artificial Sequence
  Synthetic polypeptide
KQTQGTCLQLQKDVREQTTLPPRSPLALQRCRDTRWASG

SEQ ID NO: 18669 - protein, 99 aa, Artificial Sequence
  Synthetic polypeptide
LPNFTLIQCAPVKQWALIGTFLSLRCTKIGKLKADSGDMPAAAERCTGTDNSPAQVTFGSSEMQGHTMGFWLTKLNYLCHLSMLTDSLFLPISHCQCIL

SEQ ID NO: 18670 - protein, 25 aa, Artificial Sequence
  Synthetic polypeptide
DAEKLPWMVYCKFSIWRYHYHTLPT

SEQ ID NO: 18671 - protein, 617 aa, Artificial Sequence
  Synthetic polypeptide
EAGLACGSHSDRQSSVWRFIVNHCSKNYSRNIPGKQRESTDPLKELYHCCRLHEMLKNCLGWYTVNSAYGDTIIIPCRLDVPQNLMFGKWKYEKPDGSPVFIAFRSSTKKSVQYDDVPEYKDRLNLSENYTLSISNARISDEKRFVCMLVTEDNVFEAPTIVKVFKQPSKPEIVSKALFLETEQLKKLGDCISEDSYPDGNITWYRNGKVLHPLEGAVVIIFKKEMDPVTQLYTMTSTLEYKTTKADIQMPFTCSVTYYGPSGQKTIHSEQAVFDIYYPTEQVTIQVLPPKNAIKEGDNITLKCLGNGNPPPEEFLFYLPGQPEGIRSSNTYTLTDVRRNATGDYKCSLIDKKSMIASTAITVHYLDLSLNPSGEVTRQIGDALPVSCTISASRNATVVWMKDNIRLRSSPSFSSLHYQDAGNYVCETALQEVEGLKKRESLTLIVEGKPQIKMTKKTDPSGLSKTIICHVEGFPKPAIQWTITGSGSVINQTEESPYINGRYYSKIIISPEENVTLTCTAENQLERTVNSLNVSAISIPEHDEADEISDENREKVNDQAKLIVGIVVGLLLAALVAGVVYWLYMKKSKTASKHVNKDLGNMEENKKLEENNHKTEA

SEQ ID NO: 18672 - protein, 604 aa, Artificial Sequence
  Synthetic polypeptide
EAGLACGSHSDRQSSVWRFIVNHCSKNYSRNIPGKQRESTDPLKELYHCCRLHEMLKNCLGWYTVNSAYGDTIIIPCRLDVPQNLMFGKWKYEKPDGSPVFIAFRSSTKKSVQYDDVPEYKDRLNLSENYTLSISNARISDEKRFVCMLVTEDNVFEAPTIVKVFKQPSKPEIVSKALFLETEQLKKLGDCISEDSYPDGNITWYRNGKVLHPLEGAVVIIFKKEMDPVTQLYTMTSTLEYKTTKADIQMPFTCSVTYYGPSGQKTIHSEQAVFDIYYPTEQVTIQVLPPKNAIKEGDNITLKCLGNGNPPPEEFLFYLPGQPEGIRSSNTYTLTDVRRNATGDYKCSLIDKKSMIASTAITVHYLDLSLNPSGEVTRQIGDALPVSCTISASRNATVVWMKDNIRLRSSPSFSSLHYQDAGNYVCETALQEVEGLKKRESLTLIVEGKPQIKMTKKTDPSGLSKTIICHVEGFPKPAIQWTITGSGSVINQTEESPYINGRYYSKIIISPEENVTLTCTAENQLERTVNSLNVSANENREKVNDQAKLIVGIVVGLLLAALVAGVVYWLYMKKSKTASKHVNKDLGNMEENKKLEENNHKTEA

SEQ ID NO: 18673 - protein, 8 aa, Artificial Sequence
  Synthetic polypeptide
KTALDGIL

SEQ ID NO: 18674 - protein, 10 aa, Artificial Sequence
  Synthetic polypeptide
PTELISSATI

SEQ ID NO: 18675 - protein, 47 aa, Artificial Sequence
  Synthetic polypeptide
SLRKGKQLSECLDFSLVRLETEKPAAPTGLLTYRTDQLSYYLIKQNL

SEQ ID NO: 18676 - protein, 13 aa, Artificial Sequence
  Synthetic polypeptide
GETASGDHPQSLC

SEQ ID NO: 18677 - protein, 77 aa, Artificial Sequence
  Synthetic polypeptide
MDTVAHTCNPSTFGRPRRADHLRRDSVWRPSSVSVLNTQSLTVAYLLGPPWKMCRKSTRSLRSCSSLMRSLCLRKPS

SEQ ID NO: 18678 - protein, 684 aa, Artificial Sequence
  Synthetic polypeptide
SQHFWEAEAGRSLEERQRLETILSLCAEYTKPDSRLSTGTTVEDVQKINKELEKLQLSDEESVFEEALMSPDTRYRCHRKDSLPDADLASCGSLSQSSASFFTPRSTRNDELLSDLTRTPPPPSSTFPKASSESSYLSILPKTPEGISEEQRSQELAAMEETRIVILNNLEELKQKIKDINDQMDESFRELDMECALLDGEQKSETTELMKEKEILDHLNRKIAELEKNIVGEKTKDADLLDVESKHFEDLEFQQLEHESRLDEEKENLTQQLLREVAEYQRNIVSRKEKISALKKQANHIVQQAQREQDHFVKEKNNLIMMLQREKENLCNLEKKYSSLSGGKGFPVNPNTLKEGYISVNEINEPCGNSTNLSPSTQFPADADAVATEPATAVLASQPQSKEHFRSLEERKKQHKEGLYLSDTLPRKKTTSSISPHFSSATMGRSITPKAHLPLGQSNSCGSVLPPSLAAMAKDSESRRMLRGYNHQQMSEGHRQKSEFYNRTASESNVYLNSFHYPDHSYKDQAFDTLSLDSSDSMETSISACSPDNISSASTSNIARIEEMERLLKQAHAEKTRLLESREREMEAKKRALEEEKRRREILEKRLQEETSQRQKLIEKEVKIRERQRAQARPLTRYLPVRKEDFDLRSHVETAGHNIDTCYHVSITEKTCRGFLIKMGGKIK

SEQ ID NO: 18679 - protein, 779 aa, Artificial Sequence
  Synthetic polypeptide
SQHFWEAEAGRSLEERQRLETILSLCAEYTKPDSRLSTGTTVEDVQKINKELEKLQLSDEESVFEEALMSPDTRYRCHRKDSLPDADLASCGSLSQSSASFFTPRSTRNDELLSDLTRTPPPPSSTFPKASSESSYLSILPKTPEGISEEQRSQELAAMEETRIVILNNLEELKQKIKDINDQMDESFRELDMECALLDGEQKSETTELMKEKEILDHLNRKIAELEKNIVGEKTKDADLLDVESKHFEDLEFQQLEHESRLDEEKENLTQQLLREVAEYQRNIVSRKEKISALKKQANHIVQQAQREQDHFVKEKNNLIMMLQREKENLCNLEKKYSSLSGGKGFPVNPNTLKEGYISVNEINEPCGNSTNLSPSTQFPADADAVATEPATAVLASQPQSKEHFRSLEERKKQHKEGLYLSDTLPRKKTTSSISPHFSSATMGRSITPKAHLPLGQSNSCGSVLPPSLAAMAKDSESRRMLRGYNHQQMSEGHRQKSEFYNRTASESNVYLNSFHYPDHSYKDQAFDTLSLDSSDSMETSISACSPDNISSASTSNIARIEEMERLLKQAHAEKTRLLESREREMEAKKRALEEEKRRREILEKRLQEETSQRQKLIEKEVKIRERQRAQARPLTRYLPVRKEDFDLRSHVETAGHNIDTCYHVSITEKTCRGFLIKMGGKIKTWKKRWFVFDRNKRTFSYYADKHETKLKGVIYFQAIEEVYYDHLKNANKSPNPLLTFSVKTHDRIYYMVAPSPEAMRIWMDVIVTGAEGYTHFLL

SEQ ID NO: 18680 - protein, 727 aa, Artificial Sequence
  Synthetic polypeptide
SQHFWEAEAGRSLEERQRLETILSLCAEYTKPDSRLSTGTTVEDVQKINKELEKLQLSDEESVFEEALMSPDTRYRCHRKDSLPDADLASCGSLSQSSASFFTPRSTRNDELLSDLTRTPPPPSSTFPKASSESSYLSILPKTPEGISEEQRSQELAAMEETRIVILNNLEELKQKIKDINDQMDESFRELDMECALLDGEQKSETTELMKEKEILDHLNRKIAELEKNIVGEKTKEKVKLDAEREKLERLQELYSEQKTQLDNCPESMREQLQQQLKRDADLLDVESKHFEDLEFQQLEHESRLDEEKENLTQQLLREVAEYQRNIVSRKEKISALKKQANHIVQQAQREQDHFVKEKNNLIMMLQREKENLCNLEKKYSSLSGGKGFPVNPNTLKEAHLPLGQSNSCGSVLPPSLAAMAKDSESRRMLRGYNHQQMSEGHRQKSEFYNRTASESNVYLNSFHYPDHSYKDQAFDTLSLDSSDSMETSISACSPDNISSASTSNIARIEEMERLLKQAHAEKTRLLESREREMEAKKRALEEEKRRREILEKRLQEETSQRQKLIEKEVKIRERQRAQARPLTRYLPVRKEDFDLRSHVETAGHNIDTCYHVSITEKTCRGFLIKMGGKIKTWKKRWFVFDRNKRTFSYYADKHETKLKGVIYFQAIEEVYYDHLKNANKSPNPLLTFSVKTHDRIYYMVAPSPEAMRIWMDVIVTGAEGYTHFLL

SEQ ID NO: 18681 - protein, 822 aa, Artificial Sequence
  Synthetic polypeptide
SQHFWEAEAGRSLEERQRLETILSLCAEYTKPDSRLSTGTTVEDVQKINKELEKLQLSDEESVFEEALMSPDTRYRCHRKDSLPDADLASCGSLSQSSASFFTPRSTRNDELLSDLTRTPPPPSSTFPKASSESSYLSILPKTPEGISEEQRSQELAAMEETRIVILNNLEELKQKIKDINDQMDESFRELDMECALLDGEQKSETTELMKEKEILDHLNRKIAELEKNIVGEKTKEKVKLDAEREKLERLQELYSEQKTQLDNCPESMREQLQQQLKRDADLLDVESKHFEDLEFQQLEHESRLDEEKENLTQQLLREVAEYQRNIVSRKEKISALKKQANHIVQQAQREQDHFVKEKNNLIMMLQREKENLCNLEKKYSSLSGGKGFPVNPNTLKEGYISVNEINEPCGNSTNLSPSTQFPADADAVATEPATAVLASQPQSKEHFRSLEERKKQHKEGLYLSDTLPRKKTTSSISPHFSSATMGRSITPKAHLPLGQSNSCGSVLPPSLAAMAKDSESRRMLRGYNHQQMSEGHRQKSEFYNRTASESNVYLNSFHYPDHSYKDQAFDTLSLDSSDSMETSISACSPDNISSASTSNIARIEEMERLLKQAHAEKTRLLESREREMEAKKRALEEEKRRREILEKRLQEETSQRQKLIEKEVKIRERQRAQARPLTRYLPVRKEDFDLRSHVETAGHNIDTCYHVSITEKTCRGFLIKMGGKIKTWKKRWFVFDRNKRTFSYYADKHETKLKGVIYFQAIEEVYYDHLKNANKSPNPLLTFSVKTHDRIYYMVAPSPEAMRIWMDVIVTGAEGYTHFLL

SEQ ID NO: 18682 - protein, 150 aa, Artificial Sequence
  Synthetic polypeptide
SQHFWEAEAGRSLEERQRLETILSLCAEYTKPDSRLSTGTTVEDVQKINKELEKLQLSDEESVFEEALMSPDTRYRCHRKDSLPDADLASCGSLSQSSASFFTPRSTRNDELLSDLTRTPPPPSSTFPKASSESSYLSILPKVMLAQQRY

SEQ ID NO: 18683 - protein, 32 aa, Artificial Sequence
  Synthetic polypeptide
KAYESYQPTPNSNKPLVKRHCIKKVGKHDFIW

SEQ ID NO: 18684 - protein, 25 aa, Artificial Sequence
  Synthetic polypeptide
KRLKRHMNRINPLLIQTNHLLKDTV

SEQ ID NO: 18685 - protein, 183 aa, Artificial Sequence
  Synthetic polypeptide
KTLYKESREARFYLVDSEVLTHDVPYHDYFYTVNRYCIIRSSKQKCRLRVSTDLKYRKQPWGLVKSLIEKNSWSSLEDYFKQLESDLLIEESVLNQAIEDPGKLTGLRRRRRTFNRTAETVPKLSSQHSSGDVGLGAKGDITGKKKEMENYNVTLIVVMSIFVLLLVLLNVTLFLKLSKIEHA

SEQ ID NO: 18686 - protein, 260 aa, Artificial Sequence
  Synthetic polypeptide
KTLYKESREARFYLVDSEVLTHDVPYHDYFYTVNRYCIIRSSKQKCRLRVSTDLKYRKQPWGLVKSLIEKNSWSSLEDYFKQLESDLLIEESVLNQAIEDPGKLTGLRRRRRTFNRTAETVPKLSSQHSSGDVGLGAKGDITGKKKEMENYNVTLIVVMSIFVLLLVLLNVTLFLKLSKIEHAAQSFYRLRLQEEKSLNLASDMVSRAETIQKNKDQAHRLKGVLRDSIVMLEQLKSSLIMLQKTFDLLNKNKTGMAVES

SEQ ID NO: 18687 - protein, 43 aa, Artificial Sequence
  Synthetic polypeptide
GLSSHVEWLKKMMTTKRLNKMVSNQKIKLIRPQPKFRLASVDT

SEQ ID NO: 18688 - protein, 42 aa, Artificial Sequence
  Synthetic polypeptide
VFGRYPFTALSLLLSCEEGALFPFTFHHDCKFPEASPAMWNG

SEQ ID NO: 18689 - protein, 273 aa, Artificial Sequence
  Synthetic polypeptide
WFYKCLEDTPSRHSPSCCLVKKVPCSPSPSTMIVSFLRPLQPCGMVEKNDDDQKIEQDGIKPEDKAHKAATKIQASFRGHITRKKLKGEKKDDVQAAEAEANKKDEAPVADGVEKKGEGTTTAEAAPATGSKPDEPGKAGETPSEEKKGEGDAATEQAAPQAPASSEEKAGSAETESATKASTDNSPSSKAEDAPAKEEPKQADVPAAVTAAAATTPAAEDAAAKATAQPPTETGESSQAEENIEAVDETKPKESARQDEGKEEEPEADQEHA

SEQ ID NO: 18690 - protein, 16 aa, Artificial Sequence
  Synthetic polypeptide
GLSSHAERTACSQRGF

SEQ ID NO: 18691 - protein, 165 aa, Artificial Sequence
  Synthetic polypeptide
RGAFRRGSKFSEASPAMQNGLPVRSVDFNRGTDNITVRQGDTAILRCVVEDKNSKVAWLNRSGIIFAGHDKWSLDPRVELEKRHSLEYSLRIQKVDVYDEGSYTCSVQTQHEPKTSQVYLIVQVPPKISNISSDVTVNEGSNVTLVCMANGRPEPVITWRHLTPT

SEQ ID NO: 18692 - protein, 355 aa, Artificial Sequence
  Synthetic polypeptide
RGAFRRGSKFSEASPAMQNGLPVRSVDFNRGTDNITVRQGDTAILRCVVEDKNSKVAWLNRSGIIFAGHDKWSLDPRVELEKRHSLEYSLRIQKVDVYDEGSYTCSVQTQHEPKTSQVYLIVQVPPKISNISSDVTVNEGSNVTLVCMANGRPEPVITWRHLTPTGREFEGEEEYLEILGITREQSGKYECKAANEVSSADVKQVKVTVNYPPTITESKSNEATTGRQASLKCEASAVPAPDFEWYRDDTRINSANGLEIKSTEGQSSLTVTNVTEEHYGNYTCVAANKLGVTNASLVLFKRVLPTIPHPIQEIGTTVHFKQKGPGSVRGINGSISLAVPLWLLAASLLCLLSKC

SEQ ID NO: 18693 - protein, 332 aa, Artificial Sequence
  Synthetic polypeptide
RGAFRRGSKFSEASPAMQNGLPVRSVDFNRGTDNITVRQGDTAILRCVVEDKNSKVAWLNRSGIIFAGHDKWSLDPRVELEKRHSLEYSLRIQKVDVYDEGSYTCSVQTQHEPKTSQVYLIVQVPPKISNISSDVTVNEGSNVTLVCMANGRPEPVITWRHLTPTGREFEGEEEYLEILGITREQSGKYECKAANEVSSADVKQVKVTVNYPPTITESKSNEATTGRQASLKCEASAVPAPDFEWYRDDTRINSANGLEIKSTEGQSSLTVTNVTEEHYGNYTCVAANKLGVTNASLVLFRPGSVRGINGSISLAVPLWLLAASLLCLLSKC

SEQ ID NO: 18694 - protein, 64 aa, Artificial Sequence
  Synthetic polypeptide
VSLVRSDGFISIWRFPYLSSFSLLLPCEEVLFAVVLSFLRPLQPCRTDCLFAAWILTEARTTSP

SEQ ID NO: 18695 - protein, 12 aa, Artificial Sequence
  Synthetic polypeptide
ECFSERIESSRS

SEQ ID NO: 18696 - protein, 340 aa, Artificial Sequence
  Synthetic polypeptide
KNRELQIMRKLDHCNIVRLRYFFYSSGEKKDEVYLNLVLDYVPETVYRVARHYSRAKQTLPVIYVKLYMYQLFRSLAYIHSFGICHRDIKPQNLLLDPDTAVLKLCDFGSAKQLVRGEPNVSYICSRYYRAPELIFGATDYTSSIDVWSAGCVLAELLLGQPIFPGDSGVDQLVEIIKVLGTPTREQIREMNPNYTEFKFPQIKAHPWTKDSSGTGHFTSGVRVFRPRTPPEAIALCSRLLEYTPTARLTPLEACAHSFFDELRDPNVKLPNGRDTPALFNFTTQELSSNPPLATILIPPHARIQAAASTPTNATAASDANTGDRGQTNNAASASASNST

SEQ ID NO: 18697 - protein, 327 aa, Artificial Sequence
  Synthetic polypeptide
KNRELQIMRKLDHCNIVRLRYFFYSSGEKKDEVYLNLVLDYVPETVYRVARHYSRAKQTLPVIYVKLYMYQLFRSLAYIHSFGICHRDIKPQNLLLDPDTAVLKLCDFGSAKQLVRGEPNVSYICSRYYRAPELIFGATDYTSSIDVWSAGCVLAELLLGQPIFPGDSGVDQLVEIIKVLGTPTREQIREMNPNYTEFKFPQIKAHPWTKVFRPRTPPEAIALCSRLLEYTPTARLTPLEACAHSFFDELRDPNVKLPNGRDTPALFNFTTQELSSNPPLATILIPPHARIQAAASTPTNATAASDANTGDRGQTNNAASASASNST

SEQ ID NO: 18698 - protein, 18 aa, Artificial Sequence
  Synthetic polypeptide
NAFLKESRAPDHEKARSL

SEQ ID NO: 18699 - protein, 784 aa, Artificial Sequence
  Synthetic polypeptide
CASIKKPIPNIIFNGKRPNPFPLGSERRQDIHSHDFYSTLEVLASAIRIVKMSSPNLNIVTLLGSCLTYSSAYLFGIQDVLVGSSMETLIQTRLSMLCIGTSLVFGPILGKSWRLYKVFTQRVPDKRVIIKDLQLLGLVAALLMADVILLMTWVLTDPIQCLQILSVSMTVTGKDVSCTSTSTHFCASRYSDVWIALIWGCKGLLLLYGAYLAGLTGHVSSPPVNQSLTIMVGVNLLVLAAGLLFVVTRYLHSWPNLVFGLTSGGIFVCTTTINCFIFIPQLKQWKAFEEENQTIRRMAKYFSTPNKSFHTQYGEEENCHPRGEKSSMERLLTEKNAVIESLQEQVNNAKEKIVRLMSAECTYDLPEGAAPPASSPNKDVQAVASVHTLAAAQGPSGHLSDFQNDPGMAARDSQCTSGPSSYAQSLEGPGKDSSFSPGKEEKISDSKDFSDHLDSGCSQKPWTEQSLGPERGDQVPMNPSQSLLPERGGSDPQRQRHLENSEEPPERRSRVSSVIREKLQEVLQDLGLGPEASLSTAPSCHQQTWKNSAAFSPQKMPLSKELGFSPYMVRRRRAAQRARSHFPGSAPSSVGHRANRTVPGAHSRLHVQNGDSPSLAPQTTDSRVRRPSSRKPSLPSDPQDRPGTLEGSKQSQTEPEGARGSKAAFLRQPSGSGRAPSPAAPCLSKASPDLPEQWQLWPPVPSGCASLSSQHSYFDTESSSSDEFFCRCHRPYCEICFQSSSDSSDSGTSDTDPEPTGGLASWEKLWARSKPIVNFKDDLKPTLV

SEQ ID NO: 18700 - protein, 780 aa, Artificial Sequence
  Synthetic polypeptide
CASIKKPIPNIIFNGKRPNPFPLGSERRQDIHSHDFYSTLEVLASAIRIVKMSSPNLNIVTLLGSCLTYSSAYLFGIQDVLVGSSMETLIQTRLSMLCIGTSLVFGPILGKSWRLYKVFTQRVPDKRVIIKDLQLLGLVAALLMADVILLMTWVLTDPIQCLQILSVTGKDVSCTSTSTHFCASRYSDVWIALIWGCKGLLLLYGAYLAGLTGHVSSPPVNQSLTIMVGVNLLVLAAGLLFVVTRYLHSWPNLVFGLTSGGIFVCTTTINCFIFIPQLKQWKAFEEENQTIRRMAKYFSTPNKSFHTQYGEEENCHPRGEKSSMERLLTEKNAVIESLQEQVNNAKEKIVRLMSAECTYDLPEGAAPPASSPNKDVQAVASVHTLAAAQGPSGHLSDFQNDPGMAARDSQCTSGPSSYAQSLEGPGKDSSFSPGKEEKISDSKDFSDHLDSGCSQKPWTEQSLGPERGDQVPMNPSQSLLPERGGSDPQRQRHLENSEEPPERRSRVSSVIREKLQEVLQDLGLGPEASLSTAPSCHQQTWKNSAAFSPQKMPLSKELGFSPYMVRRRRAAQRARSHFPGSAPSSVGHRANRTVPGAHSRLHVQNGDSPSLAPQTTDSRVRRPSSRKPSLPSDPQDRPGTLEGSKQSQTEPEGARGSKAAFLRQPSGSGRAPSPAAPCLSKASPDLPEQWQLWPPVPSGCASLSSQHSYFDTESSSSDEFFCRCHRPYCEICFQSSSDSSDSGTSDTDPEPTGGLASWEKLWARSKPIVNFKDDLKPTLV

SEQ ID NO: 18701 - protein, 2 aa, Artificial Sequence
  Synthetic polypeptide
GL

SEQ ID NO: 18702 - protein, 54 aa, Artificial Sequence
  Synthetic polypeptide
KTESFPIRIRKKTRYPLSRLLFNTGGFSQCNKDCEDVQSQSEHCDLTGQLSHLQ

SEQ ID NO: 18703 - protein, 862 aa, Artificial Sequence
  Synthetic polypeptide
LKHRLFLVLEPADLQTGTIPLVLLVLRSSDSDWHTISSPGSPACQLTLQILGLVSLHNHLLIGYENGTVVFWDLKSKRAELRVYYDEAIHSIDWHHEGKQFMCSHSDGSLTLWNLKSPSRPFQTTIPHGKSQREGRKSESCKPILKVEYKTCKNSEPFIIFSGGLSYDKACRRPSLTIMHGKAITVLEMDHPIVEFLTLCETPYPNEFQEPYAVVVLLEKDLIVVDLTQSNFPIFENPYPMDIHESPVTCTAYFADCPPDLILVLYSIGVKHKKQGYSNKEWPISGGAWNLGAQTYPEIIITGHADGSIKFWDASAITLQMLYKLKTSKVFEKQKVGEGKQTCEIVEEDPFAIQMIYWCPESRIFCVSGVSAYVIIYKFSRHEITTEIVSLEVRLQYDVEDIITPEPETSPPFPDLSAQLPSSRSLSGSTNTVASEGVTKDSIPCLNVKTRPVRMPPGYQAELVIQLVWVDGEPPQQITSLAVSSAYGIVAFGNCNGLAVVDFIQKTVLLSMGTIDLYRSSDLYQRQPRSPRKNKQFIADNFCMRGLSNFYPDLTKRIRTSYQSLTELNDSPVPLELERCKSPTSDHVNGHCTSPTSQSCSSGKRLSSADVSKVNRWGPGRPPFRKAQSAACMEISLPVTTEENRENSYNRSRSSSISSIDKDSKEAITALYFMDSFARKNDSTISPCLFVGTSLGMVLIISLNLPLADEQRFTEPVMVLPSGTFLSLKGAVLTFSCMDRMGGLMQPPYEVWRDPNNIDENEKSWRRKVVMNSSSASQEIGDHQYTIICSEKQAKVFSLPSQTCLYVHNITETSFILQANVVVMCSSACLACFCANGHIMIMRYLPSYKLSGNHNNTSKVQS

SEQ ID NO: 18704 - protein, 1022 aa, Artificial Sequence
  Synthetic polypeptide
LKHRLFLVLEPADLQTGTIPLVLLVLRSSDSDWHTISSPGSPACQLTLQILGLVSLHNHLLIGYENGTVVFWDLKSKRAELRVYYDEAIHSIDWHHEGKQFMCSHSDGSLTLWNLKSPSRPFQTTIPHGKSQREGRKSESCKPILKVEYKTCKNSEPFIIFSGGLSYDKACRRPSLTIMHGKAITVLEMDHPIVEFLTLCETPYPNEFQEPYAVVVLLEKDLIVVDLTQSNFPIFENPYPMDIHESPVTCTAYFADCPPDLILVLYSIGVKHKKQGYSNKEWPISGGAWNLGAQTYPEIIITGHADGSIKFWDASAITLQMLYKLKTSKVFEKQKVGEGKQTCEIVEEDPFAIQMIYWCPESRIFCVSGVSAYVIIYKFSRHEITTEIVSLEVRLQYDVEDIITPEPETSPPFPDLSAQLPSSRSLSGSTNTVASEGVTKDSIPCLNVKTRPVRMPPGYQAELVIQLVWVDGEPPQQITSLAVSSAYGIVAFGNCNGLAVVDFIQKTVLLSMGTIDLYRSSDLYQRQPRSPRKNKQFIADNFCMRGLSNFYPDLTKRIRTSYQSLTELNDSPVPLELERCKSPTSDHVNGHCTSPTSQSCSSGKRLSSADVSKVNRWGPGRPPFRKAQSAACMEISLPVTTEENRENSYNRSRSSSISSIDKDSKEAITALYFMDSFARKNDSTISPCLFVGTSLGMVLIISLNLPLADEQRFTEPVMVLPSGTFLSLKGAVLTFSCMDRMGGLMQPPYEVWRDPNNIDENEKSWRRKVVMNSSSASQEIGDHQYTIICSEKQAKVFSLPSQTCLYVHNITETSFILQANVVVMCSSACLACFCANGHIMIMSLPSLRPMLDVNYLPLTDMRIARTFCFTNEGQALYLVSPTEIQRLTYSQEMCDNLQDMLGDLFTPIETPEAQNRGFLKGLFGGSGQTFDREELFGEASAGKASRSLAQHIPGPGSIEGMKGAAGGVMGELTRARIALDERGQRLGELEEKTAGMMTSAEAFSKHAHELMLKYKDKKWYQF

SEQ ID NO: 18705 - protein, 965 aa, Artificial Sequence
  Synthetic polypeptide
LKHRLFLVLEPADLQTGTIPLVLLVLRSSDSDWHTISSPGSPACQLTLQILGLVSLHNHLLIGYENGTVVFWDLKSKRAELRVYYDEAIHSIDWHHEGKQFMCSHSDGSLTLWNLKSPSRPFQTTIPHGKSQREGRKSESCKPILKVEYKTCKNSEPFIIFSGGLSYDKACRRPSLTIMHGKAITVLEMDHPIVEFLTLCETPYPNEFQEPYAVVVLLEKDLIVVDLTQSNFPIFENPYPMDIHESPVTCTAYFADCPPDLILVLYSIGVKHKKQGYSNKEWPISGGAWNLGAQTYPEIIITGHADGSIKFWDASAITLQMLYKLKTSKVFEKQKVGEGKQTCEIVEEDPFAIQMIYWCPESRIFCVSGVSAYVIIYKFSRHEITTEIVSLEVRLQYDVEDIITPEPETSPPFPDLSAQLPSSRSLSGSTNTVASEGVTKDSIPCLNVKTRPVRMPPGYQAELVIQLVWVDGEPPQQITSLAVSSAYGIVAFGNCNGLAVVDFIQKTVLLSMGTIDLYRSSDLYQRQPRSPRKNKQFIADNFCMRGLSNFYPDLTKRIRTSYQSLTELNDSPVPLELERCKSPTSENRENSYNRSRSSSISSIDKDSKEAITALYFMDSFARKNDSTISPCLFVGTSLGMVLIISLNLPLADEQRFTEPVMVLPSGTFLSLKGAVLTFSCMDRMGGLMQPPYEVWRDPNNIDENEKSWRRKVVMNSSSASQEIGDHQYTIICSEKQAKVFSLPSQTCLYVHNITETSFILQANVVVMCSSACLACFCANGHIMIMSLPSLRPMLDVNYLPLTDMRIARTFCFTNEGQALYLVSPTEIQRLTYSQEMCDNLQDMLGDLFTPIETPEAQNRGFLKGLFGGSGQTFDREELFGEASAGKASRSLAQHIPGPGSIEGMKGAAGGVMGELTRARIALDERGQRLGELEEKTAGMMTSAEAFSKHAHELMLKYKDKKWYQF

SEQ ID NO: 18706 - protein, 836 aa, Artificial Sequence
  Synthetic polypeptide
LKHRLFLVLEPADLQTGTIPLVLLVLRSSDSDWHTISSPGSPACQLTLQILGLVSLHNHLLIGYENGTVVFWDLKSKRAELRVYYDEAIHSIDWHHEGKQFMCSHSDGSLTLWNLKSPSRPFQTTIPHGKSQREGRKSESCKPILKVEYKTCKNSEPFIIFSGGLSYDKACRRPSLTIMHGKAITVLEMDHPIVEFLTLCETPYPNEFQEPYAVVVLLEKDLIVVDLTQSNFPIFENPYPMDIHESPVTCTAYFADCPPDLILVLYSIGVKHKKQGYSNKEWPISGGAWNLGAQTYPEIIITGHADGSIKFWDASAITLQMLYKLKTSKVFEKQKVGEGKQTCEIVEEDPFAIQMIYWCPESRIFCVSGVSAYVIIYKFSRHEITTEIVSLEVRLQYDVEDIITPEPETSPPFPDLSAQLPSSRSLSGSTNTVASEGVTKDSIPCLNVKTRPVRMPPGYQAELVIQLVWVDGEPPQQITSLAVSSAYGIVAFGNCNGLAVVDFIQKTVLLSMGTIDLYRSSDLYQRQPRSPRKNKQFIADNFCMRGLSNFYPDLTKRIRTSYQSLTELNDSPVPLELERCKSPTSGLATRTPESALGFYRNEISAMRQRNQVYHLPENRENSYNRSRSSSISSIDKDSKEAITALYFMDSFARKNDSTISPCLFVGTSLGMVLIISLNLPLADEQRFTEPVMVLPSGTFLSLKGAVLTFSCMDRMGGLMQPPYEVWRDPNNIDENEKSWRRKVVMNSSSASQEIGDHQYTIICSEKQAKVFSLPSQTCLYVHNITETSFILQANVVVMCSSACLACFCANGHIMIMRYLPSYKLSGNHNNTSKVQS

SEQ ID NO: 18707 - protein, 838 aa, Artificial Sequence
  Synthetic polypeptide
LKHRLFLVLEPADLQTGTIPLVLLVLRSSDSDWHTISSPGSPACQLTLQILGLVSLHNHLLIGYENGTVVFWDLKSKRAELRVYYDEAIHSIDWHHEGKQFMCSHSDGSLTLWNLKSPSRPFQTTIPHGKSQREGRKSESCKPILKVEYKTCKNSEPFIIFSGGLSYDKACRRPSLTIMHGKAITVLEMDHPIVEFLTLCETPYPNEFQEPYAVVVLLEKDLIVVDLTQSNFPIFENPYPMDIHESPVTCTAYFADCPPDLILVLYSIGVKHKKQGYSNKEWPISGGAWNLGAQTYPEIIITGHADGSIKFWDASAITLQMLYKLKTSKVFEKQKVGEGKQTCEIVEEDPFAIQMIYWCPESRIFCVSGVSAYVIIYKFSRHEITTEIVSLEVRLQYDVEDIITPEPETSPPFPDLSAQLPSSRSLSGSTNTVASEGVTKDSIPCLNVKTRPVRMPPGYQAELVIQLVWVDGEPPQQITSLAVSSAYGIVAFGNCNGLAVVDFIQKTVLLSMGTIDLYRSSDLYQRQPRSPRKNKQFIAGLTELNDSPVPLELERCKSPTSDHVNGHCTSPTSQSCSSGKRLSSADVSKVNRWGPGRPPFRKAQSAACMEISLPVTTEENRENSYNRSRSSSISSIDKDSKEAITALYFMDSFARKNDSTISPCLFVGTSLGMVLIISLNLPLADEQRFTEPVMVLPSGTFLSLKGAVLTFSCMDRMGGLMQPPYEVWRDPNNIDENEKSWRRKVVMNSSSASQEIGDHQYTIICSEKQAKVFSLPSQTCLYVHNITETSFILQANVVVMCSSACLACFCANGHIMIMRYLPSYKLSGNHNNTSKVQS

SEQ ID NO: 18708 - protein, 998 aa, Artificial Sequence
  Synthetic polypeptide
LKHRLFLVLEPADLQTGTIPLVLLVLRSSDSDWHTISSPGSPACQLTLQILGLVSLHNHLLIGYENGTVVFWDLKSKRAELRVYYDEAIHSIDWHHEGKQFMCSHSDGSLTLWNLKSPSRPFQTTIPHGKSQREGRKSESCKPILKVEYKTCKNSEPFIIFSGGLSYDKACRRPSLTIMHGKAITVLEMDHPIVEFLTLCETPYPNEFQEPYAVVVLLEKDLIVVDLTQSNFPIFENPYPMDIHESPVTCTAYFADCPPDLILVLYSIGVKHKKQGYSNKEWPISGGAWNLGAQTYPEIIITGHADGSIKFWDASAITLQMLYKLKTSKVFEKQKVGEGKQTCEIVEEDPFAIQMIYWCPESRIFCVSGVSAYVIIYKFSRHEITTEIVSLEVRLQYDVEDIITPEPETSPPFPDLSAQLPSSRSLSGSTNTVASEGVTKDSIPCLNVKTRPVRMPPGYQAELVIQLVWVDGEPPQQITSLAVSSAYGIVAFGNCNGLAVVDFIQKTVLLSMGTIDLYRSSDLYQRQPRSPRKNKQFIAGLTELNDSPVPLELERCKSPTSDHVNGHCTSPTSQSCSSGKRLSSADVSKVNRWGPGRPPFRKAQSAACMEISLPVTTEENRENSYNRSRSSSISSIDKDSKEAITALYFMDSFARKNDSTISPCLFVGTSLGMVLIISLNLPLADEQRFTEPVMVLPSGTFLSLKGAVLTFSCMDRMGGLMQPPYEVWRDPNNIDENEKSWRRKVVMNSSSASQEIGDHQYTIICSEKQAKVFSLPSQTCLYVHNITETSFILQANVVVMCSSACLACFCANGHIMIMSLPSLRPMLDVNYLPLTDMRIARTFCFTNEGQALYLVSPTEIQRLTYSQEMCDNLQDMLGDLFTPIETPEAQNRGFLKGLFGGSGQTFDREELFGEASAGKASRSLAQHIPGPGSIEGMKGAAGGVMGELTRARIALDERGQRLGELEEKTAGMMTSAEAFSKHAHELMLKYKDKKWYQF

SEQ ID NO: 18709 - protein, 59 aa, Artificial Sequence
  Synthetic polypeptide
NIGSSWFLSLLTFRLELYHWFSWFSGLQTQTGTPSALLDLLLASSPCRSWDLSAFIITC

SEQ ID NO: 18710 - protein, 6 aa, Artificial Sequence
  Synthetic polypeptide
SPANRL

SEQ ID NO: 18711 - protein, 13 aa, Artificial Sequence
  Synthetic polypeptide
LNARQRRAIHRFN

SEQ ID NO: 18712 - protein, 13 aa, Artificial Sequence
  Synthetic polypeptide
LTECQTEKSHSQV

SEQ ID NO: 18713 - protein, 308 aa, Artificial Sequence
  Synthetic polypeptide
MPDREEPFTGLTELNDSPVPLELERCKSPTSDHVNGHCTSPTSQSCSSGKRLSSADVSKVNRWGPGRPPFRKAQSAACMEISLPVTTEENRENSYNRSRSSSISSIDKDSKEAITALYFMDSFARKNDSTISPCLFVGTSLGMVLIISLNLPLADEQRFTEPVMVLPSGTFLSLKGAVLTFSCMDRMGGLMQPPYEVWRDPNNIDENEKSWRRKVVMNSSSASQEIGDHQYTIICSEKQAKVFSLPSQTCLYVHNITETSFILQANVVVMCSSACLACFCANGHIMIMRYLPSYKLSGNHNNTSKVQS

SEQ ID NO: 18714 - protein, 468 aa, Artificial Sequence
  Synthetic polypeptide
MPDREEPFTGLTELNDSPVPLELERCKSPTSDHVNGHCTSPTSQSCSSGKRLSSADVSKVNRWGPGRPPFRKAQSAACMEISLPVTTEENRENSYNRSRSSSISSIDKDSKEAITALYFMDSFARKNDSTISPCLFVGTSLGMVLIISLNLPLADEQRFTEPVMVLPSGTFLSLKGAVLTFSCMDRMGGLMQPPYEVWRDPNNIDENEKSWRRKVVMNSSSASQEIGDHQYTIICSEKQAKVFSLPSQTCLYVHNITETSFILQANVVVMCSSACLACFCANGHIMIMSLPSLRPMLDVNYLPLTDMRIARTFCFTNEGQALYLVSPTEIQRLTYSQEMCDNLQDMLGDLFTPIETPEAQNRGFLKGLFGGSGQTFDREELFGEASAGKASRSLAQHIPGPGSIEGMKGAAGGVMGELTRARIALDERGQRLGELEEKTAGMMTSAEAFSKHAHELMLKYKDKKWYQF

SEQ ID NO: 18715 - protein, 411 aa, Artificial Sequence
  Synthetic polypeptide
MPDREEPFTGLTELNDSPVPLELERCKSPTSENRENSYNRSRSSSISSIDKDSKEAITALYFMDSFARKNDSTISPCLFVGTSLGMVLIISLNLPLADEQRFTEPVMVLPSGTFLSLKGAVLTFSCMDRMGGLMQPPYEVWRDPNNIDENEKSWRRKVVMNSSSASQEIGDHQYTIICSEKQAKVFSLPSQTCLYVHNITETSFILQANVVVMCSSACLACFCANGHIMIMSLPSLRPMLDVNYLPLTDMRIARTFCFTNEGQALYLVSPTEIQRLTYSQEMCDNLQDMLGDLFTPIETPEAQNRGFLKGLFGGSGQTFDREELFGEASAGKASRSLAQHIPGPGSIEGMKGAAGGVMGELTRARIALDERGQRLGELEEKTAGMMTSAEAFSKHAHELMLKYKDKKWYQF

SEQ ID NO: 18716 - protein, 282 aa, Artificial Sequence
  Synthetic polypeptide
MPDREEPFTGLTELNDSPVPLELERCKSPTSGLATRTPESALGFYRNEISAMRQRNQVYHLPENRENSYNRSRSSSISSIDKDSKEAITALYFMDSFARKNDSTISPCLFVGTSLGMVLIISLNLPLADEQRFTEPVMVLPSGTFLSLKGAVLTFSCMDRMGGLMQPPYEVWRDPNNIDENEKSWRRKVVMNSSSASQEIGDHQYTIICSEKQAKVFSLPSQTCLYVHNITETSFILQANVVVMCSSACLACFCANGHIMIMRYLPSYKLSGNHNNTSKVQS

SEQ ID NO: 18717 - protein, 26 aa, Artificial Sequence
  Synthetic polypeptide
DVTCSSLLSAMIVRLPQPCGTHYGTE

SEQ ID NO: 18718 - protein, 220 aa, Artificial Sequence
  Synthetic polypeptide
GFPSHVELTMGLSNILFVMAFLLSANFSQPEIVPISNITENVYINLTCSSIHGYPEPKKMSVLLRTKNSTIEYDGVMQKSQDNVTELYDVSISLSVSFPDVTSNMTIFCILETDKTRLLSSPFSIELEDPQPPPDHIPWITAVLPTVIICVMVFCLILWKWKKKKRPRNSYKCGTNTMEREESEQTKKREKIHIPERSDEAQRVFKSSKTSSCDKSDTCF

SEQ ID NO: 18719 - protein, 119 aa, Artificial Sequence
  Synthetic polypeptide
GFPSHVELTMGLSNILFVMAFLLSELEDPQPPPDHIPWITAVLPTVIICVMVFCLILWKWKKKKRPRNSYKCGTNTMEREESEQTKKREKIHIPERSDEAQRVFKSSKTSSCDKSDTCF

SEQ ID NO: 18720 - protein, 332 aa, Artificial Sequence
  Synthetic polypeptide
GFPSHVELTMGLSNILFVMAFLLSGAAPLKIQAYFNETADLPCQFANSQNQSLSELVVFWQDQENLVLNEVYLGKEKFDSVHSKYMGRTSFDSDSWTLRLHNLQIKDKGLYQCIIHHKKPTGMIRIHQMNSELSVLANFSQPEIVPISNITENVYINLTCSSIHGYPEPKKMSVLLRTKNSTIEYDGVMQKSQDNVTELYDVSISLSVSFPDVTSNMTIFCILETDKTRLLSSPFSIELEDPQPPPDHIPWITAVLPTVIICVMVFCLILWKWKKKKRPRNSYKCGTNTMEREESEQTKKREKIHIPERSDEAQRVFKSSKTSSCDKSDTCF

SEQ ID NO: 18721 - protein, 284 aa, Artificial Sequence
  Synthetic polypeptide
GFPSHVELTMGLSNILFVMAFLLSGAAPLKIQAYFNETADLPCQFANSQNQSLSELVVFWQDQENLVLNEVYLGKEKFDSVHSKYMGRTSFDSDSWTLRLHNLQIKDKGLYQCIIHHKKPTGMIRIHQMNSELSVLANFSQPEIVPISNITENVYINLTCSSIHGYPEPKKMSVLLRTKNSTIEYDGVMQKSQDNVTELYDVSISLSVSFPDVTSNMTIFCILETDKTRLLSSPFSIGTNTMEREESEQTKKREKIHIPERSDEAQRVFKSSKTSSCDKSDTCF

SEQ ID NO: 18722 - protein, 41 aa, Artificial Sequence
  Synthetic polypeptide
NGCSPALLSLPAAIHIRCDLLLLAFCHDCEASPAMWNSLWD

SEQ ID NO: 18723 - protein, 33 aa, Artificial Sequence
  Synthetic polypeptide
GFPSHVELVPVLACDGPAHRTLCHPVCLYHPQM

SEQ ID NO: 18724 - protein, 10 aa, Artificial Sequence
  Synthetic polypeptide
PCGTGACPCL

SEQ ID NO: 18725 - protein, 479 aa, Artificial Sequence
  Synthetic polypeptide
WFQKGVFPCTALSLPAAIHIRCDLLLLAFCHDCEASLAMWNWCLSLLVTVQHTERYVTLFASIILKCDYTTSAQLQDVVVTWRFKSFCKDPIFDYYSASYQAALSLGQDPSNDCNDNQREVRIVAQRRGQNEPVLGVDYRQRKITIQNPLARHRYMKQAQALGPQMMGKPLYWGADRSSQVSSYPMHPLLQRDLSLPSSLPQMPMTQTTNQPPIANGVLEYLEKELRNLNLAQPLPPDLKGRFGHPCSMLSSLGSEVVERRIIHLPPLIRDLSSSRRTSDSLHQQWLTPIPSRPWDLREGRSHHHYPDFHQELQDRGPKSWALERRELDPSWSGRHRSSRLNGSPIHWSDRDSLSDVPSSSEARWRPSHPPFRSRCQERPRRPSPRESTQRHGRRRRHRSYSPPLPSGLSSWSSEEDKERQPQSWRAHRRGSHSPHWPEEKPPSYRSLDITPGKNSRKKGSVERRSEKDSSHSGRSVVI

SEQ ID NO: 18726 - protein, 568 aa, Artificial Sequence
  Synthetic polypeptide
WFQKGVFPCTALSLPAAIHIRCDLLLLAFCHDCEASLAMWNWCLSLLVTVQHTERYVTLFASIILKCDYTTSAQLQDVVVTWRFKSFCKDPIFDYYSASYQAALSLGQDPSNDCNDNQREVRIVAQRRGQNEPVLGVDYRQRKITIQNRADLVINEVMWWDHGVYYCTIEAPGDTSGDPDKEVKLIVLHWLTVIFIILGALLLLLLIGVCWCQCCPQYCCCYIRCPCCPAHCCCPEEALARHRYMKQAQALGPQMMGKPLYWGADRSSQVSSYPMHPLLQRDLSLPSSLPQMPMTQTTNQPPIANGVLEYLEKELRNLNLAQPLPPDLKGRFGHPCSMLSSLGSEVVERRIIHLPPLIRDLSSSRRTSDSLHQQWLTPIPSRPWDLREGRSHHHYPDFHQELQDRGPKSWALERRELDPSWSGRHRSSRLNGSPIHWSDRDSLSDVPSSSEARWRPSHPPFRSRCQERPRRPSPRESTQRHGRRRRHRSYSPPLPSGLSSWSSEEDKERQPQSWRAHRRGSHSPHWPEEKPPSYRSLDITPGKNSRKKGSVERRSEKDSSHSGRSVVI

SEQ ID NO: 18727 - protein, 524 aa, Artificial Sequence
  Synthetic polypeptide
WFQKGVFPCTALSLPAAIHIRCDLLLLAFCHDCEASLAMWNWCLSLLVTVQHTERYVTLFASIILKCDYTTSAQLQDVVVTWRFKSFCKDPIFDYYSASYQAALSLGQDPSNDCNDNQREVRIVAQRRGQNEPVLGVDYRQRKITIQNRADLVINEVMWWDHGVYYCTIEAPGDTSGDPDKEVKLIVLHWLTVIFIILGALLLLLLIGVCWCQCCPQYCCCYIRCPCCPAHCCCPEEDLSLPSSLPQMPMTQTTNQPPIANGVLEYLEKELRNLNLAQPLPPDLKGRFGHPCSMLSSLGSEVVERRIIHLPPLIRDLSSSRRTSDSLHQQWLTPIPSRPWDLREGRSHHHYPDFHQELQDRGPKSWALERRELDPSWSGRHRSSRLNGSPIHWSDRDSLSDVPSSSEARWRPSHPPFRSRCQERPRRPSPRESTQRHGRRRRHRSYSPPLPSGLSSWSSEEDKERQPQSWRAHRRGSHSPHWPEEKPPSYRSLDITPGKNSRKKGSVERRSEKDSSHSGRSVVI

SEQ ID NO: 18728 - protein, 451 aa, Artificial Sequence; identical to SEQ ID NO: 2132
  Synthetic polypeptide

SEQ ID NO: 18729 - protein, 540 aa, Artificial Sequence; identical to SEQ ID NO: 1952
  Synthetic polypeptide

SEQ ID NO: 18730 - protein, 496 aa, Artificial Sequence; identical to SEQ ID NO: 2047
  Synthetic polypeptide

SEQ ID NO: 18731 - protein, 32 aa, Artificial Sequence; identical to SEQ ID NO: 6341
  Synthetic polypeptide

SEQ ID NO: 18732 - protein, 38 aa, Artificial Sequence; identical to SEQ ID NO: 5891
  Synthetic polypeptide

SEQ ID NO: 18733 - protein, 14 aa, Artificial Sequence
  Synthetic polypeptide
RKNQLAPYSCSAST

SEQ ID NO: 18734 - protein, 189 aa, Artificial Sequence; identical to SEQ ID NO: 2909
  Synthetic polypeptide

SEQ ID NO: 18735 - protein, 517 aa, Artificial Sequence; identical to SEQ ID NO: 1998
  Synthetic polypeptide

SEQ ID NO: 18736 - protein, 542 aa, Artificial Sequence; identical to SEQ ID NO: 1944
  Synthetic polypeptide

SEQ ID NO: 18737 - protein, 17 aa, Artificial Sequence
  Synthetic polypeptide
GLPSHVERCCLETLARK

SEQ ID NO: 18738 - protein, 1295 aa, Artificial Sequence
  Synthetic polypeptide
LCFSFAFCHECEASLAMWNDAAWKHWPESNTEAHVENITFYQNQEDFSTVSSKEGVMVQTSGKSHAASDAPENLTLLAETADARGRSGSSSRTNFTILPVGYSLEIATALTSQSGNLASESLHLPSSSSEFDERIAAFQTKSGTASEMGTERAMGLSEEWTVHSQEATTSAWSPSFLPALEMGELTTPSRKRNSSGPDLSWLHFYRTAASSPLLDLSSSSESTEKLNNSTGLQSSSVSQTKTMHVATVFTDGGPRTLRSLTVSLGPVSKTEGFPKDSRIATTSSSVLLSPSAVESRRNSRVTGNPGDEEFIEPSTENEFGLTSLRWQNDSPTFGEHQLASSSEVQNGSPMSQTETVSRSVAPMRGGEITAHWLLTNSTTSADVTGSSASYPEGVNASVLTQFSDSTVQSGGSHTALGDRSYSESSSTSSSESLNSSAPRGERSIAGISYGQVRGTAIEQRTSSDHTDHTYLSSTFTKGERALLSITDNSSSSDIVESSTSYIKISNSSHSEYSSFFHAQTERSNISSYDGEYAQPSTESPVLHTSNLPSYTPTINMPNTSVVLDTDAEFVSDSSSSSSSSSSSSSSGPPLPLPSVSQSHHLFSSILPSTRASVHLLKSTSDASTPWSSSPSPLPVSLTTSTSAPLSVSQTTLPQSSSTPVLPRARETPVTSFQTSTMTSFMTMLHSSQTADLKSQSTPHQEKVITESKSPSLVSLPTESTKAVTTNSPLPPSLTESSTEQTLPATSTNLAQMSPTFTTTILKTSQPLMTTPGTLSSTASLVTGPIAVQTTAGKQLSLTHPEILVPQISTEGGISTERNRVIVDATTGLIPLTSVPTSAKEMTTKLGVTAEYSPASRSLGTSPSPQTTVVSTAEDLAPKSATFAVQSSTQSPTTVSSSASVNSCAVNPCLHNGECVADNTSRGYHCRCPPSWQGDDCSVDVNECLSNPCPSTAMCNNTQGSFICKCPVGYQLEKGICNLVRTFVTEFKLKRTFLNTTVEKHSDLQEVENEITKTLNMCFSALPSYIRSTVHASRESNAVVISLQTTFSLASNVTLFDLADRMQKCVNSCKSSAEVCQLLGSQRRIFRAGSLCKRKSPECDKDTSICTDLDGVALCQCKSGYFQFNKMDHSCRACEDGYRLENETCMSCPFGLGGLNCGNPYQLITVVIAAAGGGLLLILGIALIVTCCRKNKNDISKLIFKSGDFQMSPYAEYPKNPRSQEWGREAIEMHENGSTKNLLQMTDVYYSPTSVRNPELERNGLYPAYTGLPGSRHSCIFPGQYNPSFISDESRRRDYF

SEQ ID NO: 18739 - protein, 19 aa, Artificial Sequence
  Synthetic polypeptide
PCGTMLPGNIGQKVTLRPM

SEQ ID NO: 18740 - protein, 41 aa, Artificial Sequence
  Synthetic polypeptide
IPPPSWKVSASTGMTHPQPKPPSFWTAQLWPTLDKLMTPRS

SEQ ID NO: 18741 - protein, 54 aa, Artificial Sequence
  Synthetic polypeptide
IPPPSWKVSASTGMTHPQPKPPSFWTAQLWPTLDKLMTPRSSTESSAATWPSSR

SEQ ID NO: 18742 - protein, 76 aa, Artificial Sequence
  Synthetic polypeptide
IPPPSWKVSASTGMTHPQPKPPSFWTAQLWPTLDKLMTPRSSTESSAATWPSSRCRPLSWGSWLLWLRCCWAWCLE

SEQ ID NO: 18743 - protein, 85 aa, Artificial Sequence
  Synthetic polypeptide
IPPPSWKVSASTGMTHPQPKPPSFWTAQLWPTLDKLMTPRSSTESSAATWPSSRCRPLSWGSWLLWLRCCWAWCLERKWMSPRGA

SEQ ID NO: 18744 - protein, 104 aa, Artificial Sequence
  Synthetic polypeptide
IPPPSWKVSASTGMTHPQPKPPSFWTAQLWPTLDKLMTPRSSTESSAATWPSSRCRPLSWGSWLLWLRCCWAWCLERKWMSPRWSCCVPAVSSLPSLQPLPWGC

SEQ ID NO: 18745 - protein, 104 aa, Artificial Sequence
  Synthetic polypeptide
IPPPSWKVSASTGMTHPQPKPPSFWTAQLWPTLDKLMTPRSSTESSAATWPSSRCRPLSWGSWLLWLRCCWAWCLERKWMSPRWSCCVPAVSSLPSLQPLPWVS

SEQ ID NO: 18746 - protein, 21 aa, Artificial Sequence
  Synthetic polypeptide
LIHNPSLRVFGQLSSGQHWTN

SEQ ID NO: 18747 - protein, 48 aa, Artificial Sequence
  Synthetic polypeptide
SVVFSILNPTTILEGFSIHRDDSSTTQASEFLDSSALANTGQIDDPQE

SEQ ID NO: 18748 - protein, 62 aa, Artificial Sequence
  Synthetic polypeptide
SVVFSILNPTTILEGFSIHRDDSSTTQASEFLDSSALANTGQIDDPQEQHRVISSNLALIQV

SEQ ID NO: 18749 - protein, 83 aa, Artificial Sequence
  Synthetic polypeptide
SVVFSILNPTTILEGFSIHRDDSSTTQASEFLDSSALANTGQIDDPQEQHRVISSNLALIQVQATVVGLLAAVAALLLGVVSR

SEQ ID NO: 18750 - protein, 92 aa, Artificial Sequence
  Synthetic polypeptide
SVVFSILNPTTILEGFSIHRDDSSTTQASEFLDSSALANTGQIDDPQEQHRVISSNLALIQVQATVVGLLAAVAALLLGVVSREEVDVAKGC

SEQ ID NO: 18751 - protein, 111 aa, Artificial Sequence
  Synthetic polypeptide
SVVFSILNPTTILEGFSIHRDDSSTTQASEFLDSSALANTGQIDDPQEQHRVISSNLALIQVQATVVGLLAAVAALLLGVVSREEVDVAKVELLCASSVLTAFLAAFALGE

SEQ ID NO: 18752 - protein, 146 aa, Artificial Sequence
  Synthetic polypeptide
SVVFSILNPTTILEGFSIHRDDSSTTQASEFLDSSALANTGQIDDPQEQHRVISSNLALIQVQATVVGLLAAVAALLLGVVSREEVDVAKVELLCASSVLTAFLAAFALGVLMVCIVIGARKLGVNPDNIATPIAASLGDLITLSI

SEQ ID NO: 18753 - protein, 189 aa, Artificial Sequence
  Synthetic polypeptide
SVVFSILNPTTILEGFSIHRDDSSTTQASEFLDSSALANTGQIDDPQEQHRVISSNLALIQVQATVVGLLAAVAALLLGVVSREEVDVAKVELLCASSVLTAFLAAFALGVLMVCIVIGARKLGVNPDNIATPIAASLGDLITLSILALVSSFFYRHKDSRYLTPLVCLSFAALTPVWVLIAKQSPPIV

SEQ ID NO: 18754 - protein, 417 aa, Artificial Sequence
  Synthetic polypeptide
SVVFSILNPTTILEGFSIHRDDSSTTQASEFLDSSALANTGQIDDPQEQHRVISSNLALIQVQATVVGLLAAVAALLLGVVSREEVDVAKVELLCASSVLTAFLAAFALGVLMVCIVIGARKLGVNPDNIATPIAASLGDLITLSILALVSSFFYRHKDSRYLTPLVCLSFAALTPVWVLIAKQSPPIVKILKFGWFPIILAMVISSFGGLILSKTVSKQQYKGMAIFTPVICGVGGNLVAIQTSRISTYLHMWSAPGVLPLQMKKFWPNPCSTFCTSEINSMSARVLLLLVVPGHLIFFYIIYLVEGQSVINSQTFVVLYLLAGLIQVTILLYLAEVMVRLTWHQALDPDNHCIPYLTGLGDLLGSSSVGHTAAVPRRCTASPGWGLIQPFICTQHLIVSLLSFYFPFCLLAKTSI

SEQ ID NO: 18755 - protein, 397 aa, Artificial Sequence
  Synthetic polypeptide
SVVFSILNPTTILEGFSIHRDDSSTTQASEFLDSSALANTGQIDDPQEQHRVISSNLALIQVQATVVGLLAAVAALLLGVVSREEVDVAKVELLCASSVLTAFLAAFALGVLMVCIVIGARKLGVNPDNIATPIAASLGDLITLSILALVSSFFYRHKDSRYLTPLVCLSFAALTPVWVLIAKQSPPIVKILKFGWFPIILAMVISSFGGLILSKTVSKQQYKGMAIFTPVICGVGGNLVAIQTSRISTYLHMWSAPGVLPLQMKKFWPNPCSTFCTSEINSMSARVLLLLVVPGHLIFFYIIYLVEGQSVINSQTFVVLYLLAGLIQVTILLYLAEVMVRLTWHQALDPDNHCIPYLTGLGDLLGTGLLALCFFTDWLLKSKAELGGISELASGPP

SEQ ID NO: 18756 - protein, 588 aa, Artificial Sequence
  Synthetic polypeptide
IRILGCVGQVNVRNGMSLHDCLMKALKVRGLQPECCAVFRLLHEHKGKKARLDWNTDAASLIGEELQVDFLDHVPLTTHNFARKTFLKLAFCDICQKFLLNGFRCQTCGYKFHEHCSTKVPTMCVDWSNIRQLLLFPNSTIGDSGVPALPSLTMRRMRESVSRMPVSSQHRYSTPHAFTFNTSSPSSEGSLSQRQRSTSTPNVHMVSTTLPVDSRMIEDAIRSHSESASPSALSSSPNNLSPTGWSQPKTPVPAQRERAPVSGTQEKNKIRPRGQRDSSYYWEIEASEVMLSTRIGSGSFGTVYKGKWHGDVAVKILKVVDPTPEQFQAFRNEVAVLRKTRHVNILLFMGYMTKDNLAIVTQWCEGSSLYKHLHVQETKFQMFQLIDIARQTAQGMDYLHAKNIIHRDMKSNNIFLHEGLTVKIGDFGLATVKSRWSGSQQVEQPTGSVLWMAPEVIRMQDNNPFSFQSDVYSYGIVLYELMTGELPYSHINNRDQIIFMVGRGYASPDLSKLYKNCPKAMKRLVADCVKKVKEERPLFPQILSSIELLQHSLPKINRSASEPSLHRAAHTEDINACTLTTSPRLPVF

SEQ ID NO: 18757 - protein, 608 aa, Artificial Sequence
  Synthetic polypeptide
IRILGCVGQVNVRNGMSLHDCLMKALKVRGLQPECCAVFRLLHEHKGKKARLDWNTDAASLIGEELQVDFLDHVPLTTHNFARKTFLKLAFCDICQKFLLNGFRCQTCGYKFHEHCSTKVPTMCVDWSNIRQLLLFPNSTIGDSGVPALPSLTMRRMRESVSRMPVSSQHRYSTPHAFTFNTSSPSSEGSLSQRQRSTSTPNVHMVSTTLPVDSRMIENNNLSASPRAWSRRFCLRGRDAIRSHSESASPSALSSSPNNLSPTGWSQPKTPVPAQRERAPVSGTQEKNKIRPRGQRDSSYYWEIEASEVMLSTRIGSGSFGTVYKGKWHGDVAVKILKVVDPTPEQFQAFRNEVAVLRKTRHVNILLFMGYMTKDNLAIVTQWCEGSSLYKHLHVQETKFQMFQLIDIARQTAQGMDYLHAKNIIHRDMKSNNIFLHEGLTVKIGDFGLATVKSRWSGSQQVEQPTGSVLWMAPEVIRMQDNNPFSFQSDVYSYGIVLYELMTGELPYSHINNRDQIIFMVGRGYASPDLSKLYKNCPKAMKRLVADCVKKVKEERPLFPQILSSIELLQHSLPKINRSASEPSLHRAAHTEDINACTLTTSPRLPVF

SEQ ID NO: 18758 - protein, 20 aa, Artificial Sequence
  Synthetic polypeptide
LNQNPWMCWTGQCAKWNELA

SEQ ID NO: 18759 - protein, 31 aa, Artificial Sequence
  Synthetic polypeptide
NTDSFCMNGLYSILTESESLDVLDRSMCEME

SEQ ID NO: 18760 - protein, 396 aa, Artificial Sequence
  Synthetic polypeptide
AGCEDHVRHLELGLHWTALALAIAQELGSKVPFCPMVGSEVYSTEIKKTEVLMENFRRAIGLRIKETKEVYEGEVTELTPCETENPMGGYGKTISHVIIGLKTAKGTKQLKLDPSIFESLQKERVEAGDVIYIEANSGAVKRQGRCDTYATEFDLEAEEYVPLPKGDVHKKKEIIQDVTLHDLDVANARPQGGQDILSMMGQLMKPKKTEITDKLRGEINKVVNKYIDQGIAELVPGVLFVDEVHMLDIECFTYLHRALESSIAPIVIFASNRGNCVIRGTEDITSPHGIPLDLLDRVMIIRTMLYTPQEMKQIIKIRAQTEGINISEEALNHLGEIGTKTTLRYSVQLLTPANLLAKINGKDSIEKEHVEEISELFYDAKSSAKILADQQDKYMK

SEQ ID NO: 18761 - protein, 326 aa, Artificial Sequence
  Synthetic polypeptide
AGCEDHVRHLELGLHWTALALAIAQELGSKVPFCPMVGSEVYSTEIKKTEVLMENFRRAIGLRIKETKEVYEGEVTELTPCETENPMGGYGKTISHVIIGLKTAKGTKQLKLDPSIFESLQKERVEAGDVIYIEANSGAVKRQGRCDTYATEFDLEAEEYVPLPKGDVHKKKEIIQDVTLHDLDVANARPQGGQDILSMMGQLMKPKKTEITDKLRGEINKVVNKYIDQGIAELVPGVLFVDEVHMLDIECFTYLHRALESSIAPIVIFASNRGNCVIRGTEDITSPHGIPLDLLDRVMIIRTMLYTPQEMKQVLSAAADPGQLAC

SEQ ID NO: 18762 - protein, 315 aa, Artificial Sequence
  Synthetic polypeptide
AGCEDHVRHLELGLHWTALALAIAQELGSKVPFCPMVGSEVYSTEIKKTEVLMENFRRAIGLRIKETKEVYEGEVTELTPCETENPMGGYGKTISHVIIGLKTAKGTKQLKLDPSIFESLQKERVEAGDVIYIEANSGAVKRQGRCDTYATEFDLEAEEYVPLPKGDVHKKKEIIQDVTLHDLDVANARPQGGQDILSMMGQLMKPKKTEITDKLRGEINKVVNKYIDQGIAELVPGVLFVDEVHMLDIECFTYLHRALESSIAPIVIFASNRGNCVIRGTEDITSPHGIPLDLLDRVMIIRTMLYTPQEMKQVP

SEQ ID NO: 18763 - protein, 44 aa, Artificial Sequence
  Synthetic polypeptide
GIWSWACTGQLWLWLLLRSWVVRSPSAQWWGVKFTQLRSRRQRC

SEQ ID NO: 18764 - protein, 24 aa, Artificial Sequence
  Synthetic polypeptide
GSCEAFGVGPALDSSGSGYCSGAG

SEQ ID NO: 18765 - protein, 12 aa, Artificial Sequence
  Synthetic polypeptide
DSSGSGYCSGAG

SEQ ID NO: 18766 - protein, 392 aa, Artificial Sequence
  Synthetic polypeptide
GSTSTKNTKISQTALALAIAQELGSKVPFCPMVGSEVYSTEIKKTEVLMENFRRAIGLRIKETKEVYEGEVTELTPCETENPMGGYGKTISHVIIGLKTAKGTKQLKLDPSIFESLQKERVEAGDVIYIEANSGAVKRQGRCDTYATEFDLEAEEYVPLPKGDVHKKKEIIQDVTLHDLDVANARPQGGQDILSMMGQLMKPKKTEITDKLRGEINKVVNKYIDQGIAELVPGVLFVDEVHMLDIECFTYLHRALESSIAPIVIFASNRGNCVIRGTEDITSPHGIPLDLLDRVMIIRTMLYTPQEMKQIIKIRAQTEGINISEEALNHLGEIGTKTTLRYSVQLLTPANLLAKINGKDSIEKEHVEEISELFYDAKSSAKILADQQDKYMK

SEQ ID NO: 18767 - protein, 322 aa, Artificial Sequence
  Synthetic polypeptide
GSTSTKNTKISQTALALAIAQELGSKVPFCPMVGSEVYSTEIKKTEVLMENFRRAIGLRIKETKEVYEGEVTELTPCETENPMGGYGKTISHVIIGLKTAKGTKQLKLDPSIFESLQKERVEAGDVIYIEANSGAVKRQGRCDTYATEFDLEAEEYVPLPKGDVHKKKEIIQDVTLHDLDVANARPQGGQDILSMMGQLMKPKKTEITDKLRGEINKVVNKYIDQGIAELVPGVLFVDEVHMLDIECFTYLHRALESSIAPIVIFASNRGNCVIRGTEDITSPHGIPLDLLDRVMIIRTMLYTPQEMKQVLSAAADPGQLAC

SEQ ID NO: 18768 - protein, 311 aa, Artificial Sequence
  Synthetic polypeptide
GSTSTKNTKISQTALALAIAQELGSKVPFCPMVGSEVYSTEIKKTEVLMENFRRAIGLRIKETKEVYEGEVTELTPCETENPMGGYGKTISHVIIGLKTAKGTKQLKLDPSIFESLQKERVEAGDVIYIEANSGAVKRQGRCDTYATEFDLEAEEYVPLPKGDVHKKKEIIQDVTLHDLDVANARPQGGQDILSMMGQLMKPKKTEITDKLRGEINKVVNKYIDQGIAELVPGVLFVDEVHMLDIECFTYLHRALESSIAPIVIFASNRGNCVIRGTEDITSPHGIPLDLLDRVMIIRTMLYTPQEMKQVP

SEQ ID NO: 18769 - protein, 13 aa, Artificial Sequence
  Synthetic polypeptide
PDSSGSGYCSGAG

SEQ ID NO: 18770 - protein, 73 aa, Artificial Sequence
  Synthetic polypeptide
SQHFGRPRWEDHLSPGVGDQPGKHSRAPPLQKTQKLARQLWLWLLLRSWVVRSPSAQWWGVKFTQLRSRRQRC

SEQ ID NO: 18771 - protein, 421 aa, Artificial Sequence
  Synthetic polypeptide
GSTSTKNTKISQACGVIVELIKSKKMAGRAVLLAGPPGTGKTALALAIAQELGSKVPFCPMVGSEVYSTEIKKTEVLMENFRRAIGLRIKETKEVYEGEVTELTPCETENPMGGYGKTISHVIIGLKTAKGTKQLKLDPSIFESLQKERVEAGDVIYIEANSGAVKRQGRCDTYATEFDLEAEEYVPLPKGDVHKKKEIIQDVTLHDLDVANARPQGGQDILSMMGQLMKPKKTEITDKLRGEINKVVNKYIDQGIAELVPGVLFVDEVHMLDIECFTYLHRALESSIAPIVIFASNRGNCVIRGTEDITSPHGIPLDLLDRVMIIRTMLYTPQEMKQIIKIRAQTEGINISEEALNHLGEIGTKTTLRYSVQLLTPANLLAKINGKDSIEKEHVEEISELFYDAKSSAKILADQQDKYMK

SEQ ID NO: 18772 - protein, 351 aa, Artificial Sequence
  Synthetic polypeptide
GSTSTKNTKISQACGVIVELIKSKKMAGRAVLLAGPPGTGKTALALAIAQELGSKVPFCPMVGSEVYSTEIKKTEVLMENFRRAIGLRIKETKEVYEGEVTELTPCETENPMGGYGKTISHVIIGLKTAKGTKQLKLDPSIFESLQKERVEAGDVIYIEANSGAVKRQGRCDTYATEFDLEAEEYVPLPKGDVHKKKEIIQDVTLHDLDVANARPQGGQDILSMMGQLMKPKKTEITDKLRGEINKVVNKYIDQGIAELVPGVLFVDEVHMLDIECFTYLHRALESSIAPIVIFASNRGNCVIRGTEDITSPHGIPLDLLDRVMIIRTMLYTPQEMKQVLSAAADPGQLAC

SEQ ID NO: 18773 - protein, 42 aa, Artificial Sequence
  Synthetic polypeptide
PGMWRHSRINQKQENGWKSCLVGRTSWNWQDSSGSGYCSGAG

SEQ ID NO: 18774 - protein, 42 aa, Artificial Sequence
  Synthetic polypeptide
SQHFGRPRWEDHLSPGVGDQPGKHSRAPPLQKTQKLARHVAS

SEQ ID NO: 18775 - protein, 44 aa, Artificial Sequence
  Synthetic polypeptide
EVKPFGLSGQLWLWLLLRSWVVRSPSAQWWGVKFTQLRSRRQRC

SEQ ID NO: 18776 - protein, 389 aa, Artificial Sequence
  Synthetic polypeptide
RSEAIWTFWTALALAIAQELGSKVPFCPMVGSEVYSTEIKKTEVLMENFRRAIGLRIKETKEVYEGEVTELTPCETENPMGGYGKTISHVIIGLKTAKGTKQLKLDPSIFESLQKERVEAGDVIYIEANSGAVKRQGRCDTYATEFDLEAEEYVPLPKGDVHKKKEIIQDVTLHDLDVANARPQGGQDILSMMGQLMKPKKTEITDKLRGEINKVVNKYIDQGIAELVPGVLFVDEVHMLDIECFTYLHRALESSIAPIVIFASNRGNCVIRGTEDITSPHGIPLDLLDRVMIIRTMLYTPQEMKQIIKIRAQTEGINISEEALNHLGEIGTKTTLRYSVQLLTPANLLAKINGKDSIEKEHVEEISELFYDAKSSAKILADQQDKYMK

SEQ ID NO: 18777 - protein, 319 aa, Artificial Sequence
  Synthetic polypeptide
RSEAIWTFWTALALAIAQELGSKVPFCPMVGSEVYSTEIKKTEVLMENFRRAIGLRIKETKEVYEGEVTELTPCETENPMGGYGKTISHVIIGLKTAKGTKQLKLDPSIFESLQKERVEAGDVIYIEANSGAVKRQGRCDTYATEFDLEAEEYVPLPKGDVHKKKEIIQDVTLHDLDVANARPQGGQDILSMMGQLMKPKKTEITDKLRGEINKVVNKYIDQGIAELVPGVLFVDEVHMLDIECFTYLHRALESSIAPIVIFASNRGNCVIRGTEDITSPHGIPLDLLDRVMIIRTMLYTPQEMKQVLSAAADPGQLAC

SEQ ID NO: 18778 - protein, 308 aa, Artificial Sequence
  Synthetic polypeptide
RSEAIWTFWTALALAIAQELGSKVPFCPMVGSEVYSTEIKKTEVLMENFRRAIGLRIKETKEVYEGEVTELTPCETENPMGGYGKTISHVIIGLKTAKGTKQLKLDPSIFESLQKERVEAGDVIYIEANSGAVKRQGRCDTYATEFDLEAEEYVPLPKGDVHKKKEIIQDVTLHDLDVANARPQGGQDILSMMGQLMKPKKTEITDKLRGEINKVVNKYIDQGIAELVPGVLFVDEVHMLDIECFTYLHRALESSIAPIVIFASNRGNCVIRGTEDITSPHGIPLDLLDRVMIIRTMLYTPQEMKQVP

SEQ ID NO: 18779 - protein, 18 aa, Artificial Sequence
  Synthetic polypeptide
SHLDFLDSSGSGYCSGAG

SEQ ID NO: 18780 - protein, 13 aa, Artificial Sequence
  Synthetic polypeptide
EVKPFGLSGHVAS

SEQ ID NO: 18781 - protein, 418 aa, Artificial Sequence
  Synthetic polypeptide
RSEAIWTFWACGVIVELIKSKKMAGRAVLLAGPPGTGKTALALAIAQELGSKVPFCPMVGSEVYSTEIKKTEVLMENFRRAIGLRIKETKEVYEGEVTELTPCETENPMGGYGKTISHVIIGLKTAKGTKQLKLDPSIFESLQKERVEAGDVIYIEANSGAVKRQGRCDTYATEFDLEAEEYVPLPKGDVHKKKEIIQDVTLHDLDVANARPQGGQDILSMMGQLMKPKKTEITDKLRGEINKVVNKYIDQGIAELVPGVLFVDEVHMLDIECFTYLHRALESSIAPIVIFASNRGNCVIRGTEDITSPHGIPLDLLDRVMIIRTMLYTPQEMKQIIKIRAQTEGINISEEALNHLGEIGTKTTLRYSVQLLTPANLLAKINGKDSIEKEHVEEISELFYDAKSSAKILADQQDKYMK

SEQ ID NO: 18782 - protein, 348 aa, Artificial Sequence
  Synthetic polypeptide
RSEAIWTFWACGVIVELIKSKKMAGRAVLLAGPPGTGKTALALAIAQELGSKVPFCPMVGSEVYSTEIKKTEVLMENFRRAIGLRIKETKEVYEGEVTELTPCETENPMGGYGKTISHVIIGLKTAKGTKQLKLDPSIFESLQKERVEAGDVIYIEANSGAVKRQGRCDTYATEFDLEAEEYVPLPKGDVHKKKEIIQDVTLHDLDVANARPQGGQDILSMMGQLMKPKKTEITDKLRGEINKVVNKYIDQGIAELVPGVLFVDEVHMLDIECFTYLHRALESSIAPIVIFASNRGNCVIRGTEDITSPHGIPLDLLDRVMIIRTMLYTPQEMKQVLSAAADPGQLAC

SEQ ID NO: 18783 - protein, 47 aa, Artificial Sequence
  Synthetic polypeptide
SHLDFLGMWRHSRINQKQENGWKSCLVGRTSWNWQDSSGSGYCSGAG

SEQ ID NO: 18784 - protein, 23 aa, Artificial Sequence
  Synthetic polypeptide
IEVYTLNHWIICPVRLLYQEPTC

SEQ ID NO: 18785 - protein, 502 aa, Artificial Sequence
  Synthetic polypeptide
ITGLYALFVFCTKSRRAERYWQKTLLQMEEMESQIREEIRKGFAELQTDMTDLTKELNRSQGIPFLEYKHFVTRTFFPKCSSLYEERYVLPSQTLNSQGSSQAQETHPLLGEWKIPESCRPNMEEGISLFSSLLNNKHFLIVFVHALEQQKDFAVRDRCSLASLLTIALHGKLEYYTSIMKELLVDLIDASAAKNPKLMLRRTESVVEKMLTNWMSICMYSCLRETVGEPFFLLLCAIKQQINKGSIDAITGKARYTLSEEWLLRENIEAKPRNLNVSFQGCGMDSLSVRAMDTDTLTQVKEKILEAFCKNVPYSQWPRAEDVDLEWFASSTQSYILRDLDDTSVVEDGRKKLNTLAHYKIPEGASLAMSLIDKKDNTLGRVKDLDTEKYFHLVLPTDELAEPKKSHRQSHRKKVLPEIYLTRLLSTKGTLQKFLDDLFKAILSIREDKPPLAVKYFFDFLEEQAEKRGISDPDTLHIWKTNRWRPSSPVLGEHPEEPPVCL

SEQ ID NO: 18786 - protein, 642 aa, Artificial Sequence
  Synthetic polypeptide
ITGLYALFVFCTKSRRAERYWQKTLLQMEEMESQIREEIRKGFAELQTDMTDLTKELNRSQGIPFLEYKHFVTRTFFPKCSSLYEERYVLPSQTLNSQGSSQAQETHPLLGEWKIPESCRPNMEEGISLFSSLLNNKHFLIVFVHALEQQKDFAVRDRCSLASLLTIALHGKLEYYTSIMKELLVDLIDASAAKNPKLMLRRTESVVEKMLTNWMSICMYSCLRETVGEPFFLLLCAIKQQINKGSIDAITGKARYTLSEEWLLRENIEAKPRNLNVSFQGCGMDSLSVRAMDTDTLTQVKEKILEAFCKNVPYSQWPRAEDVDLEWFASSTQSYILRDLDDTSVVEDGRKKLNTLAHYKIPEGASLAMSLIDKKDNTLGRVKDLDTEKYFHLVLPTDELAEPKKSHRQSHRKKVLPEIYLTRLLSTKGTLQKFLDDLFKAILSIREDKPPLAVKYFFDFLEEQAEKRGISDPDTLHIWKTNSLPLRFWVNILKNPQFVFDIDKTDHIDACLSVIAQAFIDACSISDLQLGKDSPTNKLLYAKEIPEYRKIVQRYYKQIQDMTPLSEQEMNAHLAEESRKYQNEFNTNVAMAEIYKYAKRYRPQIMAALEANPTARRTQLQHKFEQVVALMEDNIYECYSEA

SEQ ID NO: 18787 - protein, 54 aa, Artificial Sequence
  Synthetic polypeptide
SIHFKSLDYMPCSSSVPRADVLSVTGRRRCCRWRRWNLRSERKSAKASLSCRQT

SEQ ID NO: 18788 - protein, 26 aa, Artificial Sequence
  Synthetic polypeptide
GRAQWLTLVIPTLWETKDFIATLGKL

SEQ ID NO: 18789 - protein, 218 aa, Artificial Sequence
  Synthetic polypeptide
GRAQWLTLVIPTLWETKDFIATLGKLSGLHGQDLFGIWSKVYDPLYCESVHNFTLPSWATEDTMTKLRELSELSLLSLYGIHKQKEKSRLQGGVLVNEILNHMKRATQIPSYKKLIMYSAHDTTVSGLQMALDVYNGLLPPYASCHLTELYFEKGEYFVEMYYRNETQHEPYPLMLPGCSPSCPLERFAELVGPVIPQDWSTECMTTNSHQGTEDSTD

SEQ ID NO: 18790 - protein, 250 aa, Artificial Sequence
  Synthetic polypeptide
GRAQWLTLVIPTLWETKDFIATLGKLSGLHGQDLFGIWSKVYDPLYCESVHNFTLPSWATEDTMTKLRELSELSLLSLYGIHKQKEKSRLQGGVLVNEILNHMKRATQIPSYKKLIMYSAHDTTVSGLQMALDVYNGLLPPYASCHLTELYFEKGEYFVEMYYRNETQHEPYPLMLPGCSPSCPLERFAELVGPVIPQDWSTECMTTNSHQVLKVIFAVAFCLISAVLMVLLFIHIRRGLCWQRESYGNI

SEQ ID NO: 18791 - protein, 25 aa, Artificial Sequence
  Synthetic polypeptide
PGTVAHACNPNTLGDQGFYSYLGKT

SEQ ID NO: 18792 - protein, 38 aa, Artificial Sequence
  Synthetic polypeptide
PGTVAHACNPNTLGDQGFYSYLGKTFRITWPGPFWNLE

SEQ ID NO: 18793 - protein, 10 aa, Artificial Sequence
  Synthetic polypeptide
SQHFGRPRIL

SEQ ID NO: 18794 - protein, 185 aa, Artificial Sequence
  Synthetic polypeptide
AEIMSLHSSLGDRDVKLLHKQLAGCELEQMDAPIGTGLDDILETIRIQWERDVEKNRVEAGALLQAKQQAEVAHMSQTQEEKLAAALRVELHNTSCQVQSLQAETESLRALKRGLENTLHDAKHWHDMELQNLGAVVGRLEAELREIRAEAEQQQQERAHLLARKCQLQKDVASYHALLDREESG

SEQ ID NO: 18795 - protein, 13 aa, Artificial Sequence
  Synthetic polypeptide
QRCEAAAQTVGRV

SEQ ID NO: 18796 - protein, 36 aa, Artificial Sequence
  Synthetic polypeptide
SQLLRRLRWEDCLSPRDGGCNELRSCHCTPAWVTEM

SEQ ID NO: 18797 - protein, 58 aa, Artificial Sequence
  Synthetic polypeptide
CHFWTQLGRRNSAPCGSNTCARGMASSSSTPSLTRPALSTWTASTSLSCASKTGSHSR

SEQ ID NO: 18798 - protein, 40 aa, Artificial Sequence
  Synthetic polypeptide
LESCQLSDVISGHSWAGGIQRHAGAIHAHGGWLPHRLLRH

SEQ ID NO: 18799 - protein, 152 aa, Artificial Sequence
  Synthetic polypeptide
NHANSVMSFLDTAGQEEFSAMREQYMRTGDGFLIVYSVTDKASFEHVDRFHQLILRVKDRESFPMILVANKVDLMHLRKITREQGKEMATKHNIPYIETSAKDPPLNVDKAFHDLVRVIRQQIPEKSQKKKKKTKWRGDRATGTHKLQCVIL

SEQ ID NO: 18800 - protein, 35 aa, Artificial Sequence
  Synthetic polypeptide
NRCWTLVEVGTSGDGSWVRFSSQCAMCVCGAASAC

SEQ ID NO: 18801 - protein, 19 aa, Artificial Sequence
  Synthetic polypeptide
YKIDAGLWLRWGPQATAAG

SEQ ID NO: 18802 - protein, 73 aa, Artificial Sequence
  Synthetic polypeptide
GQVQWLTPVIPALWEAEVGYLQPLVAVQVSFAPNNTGKEVTVECKIDGSANLKSQDDRDKFLGRVMFKITARA

SEQ ID NO: 18803 - protein, 32 aa, Artificial Sequence
  Synthetic polypeptide
PGAVAHACNPSTLGGRGWVSTAIGCCSGQLCS

SEQ ID NO: 18804 - protein, 30 aa, Artificial Sequence
  Synthetic polypeptide
SQHFGRPRLGIYSHWLLFRSALLLTTLGKK

SEQ ID NO: 18805 - protein, 44 aa, Artificial Sequence
  Synthetic polypeptide
GQAQWLTPVIPALWEAEAGGSRDQEIETILANKVLSLSLCTFPV

SEQ ID NO: 18806 - protein, 26 aa, Artificial Sequence
  Synthetic polypeptide
QGIILIIMHLSCLIYTTSVHSKSILN

SEQ ID NO: 18807 - protein, 1251 aa, Artificial Sequence
  Synthetic polypeptide
SQHFGRPRRADHEIRRLRPSWLTRYYPYHYAPFLSDIHNISTLKIHFELGKPFKPFEQLLAVLPAASKNLLPACYQHLMTNEDSPIIEYYPPDFKTDLNGKQQEWEAVVLIPFIDEKRLLEAMETCNHSLKKEERKRNQHSECLMCWYDRDTEFIYPSPWPEKFPAIERCCTRYKIISLDAWRVDINKNKITRIDQKALYFCGFPTLKHIRHKFFLKKSGVQVFQQSSRGENMMLEILVDAESDELTVENVASSVLGKSVFVNWPHLEEARVVAVSDGETKFYLEEPPGTQKLYSGRTAPPSKVVHLGDKEQSNWAKEVQGISEHYLRRKGIIINETSAVVYAQLLTGRKYQINQNGEVRLEKQWSKQVVPFVYQTIVKDIRAFDSRFSNIKTLDDLFPLRSMVFMLGTPYYGCTGEVQDSGDVITEGRIRVIFSIPCEPNLDALIQNQHKYSIKYNPGYVLASRLGVSGYLVSRFTGSIFIGRGSRRNPHGDHKANVGLNLKFNKKNEEVPGYTKKVGSEWMYSSAAEQLLAEYLERAPELFSYIAKNSQEDVFYEDDIWPGENENGAEKVQEIITWLKGHPVSTLSRSSCDLQILDAAIVEKIEEEVEKCKQRKNNKKVRVTVKPHLLYRPLEQQHGVIPDRDAEFCLFDRVVNVRENFSVPVGLRGTIIGIKGANREADVLFEVLFDEEFPGGLTIRCSPGRGYRLPTSALVNLSHGSRSETGNQKLTAIVKPQPAVHQHSSSSSVSSGHLGALNHSPQSLFVPTQVPTKDDDEFCNIWQSLQGSGKMQYFQPTIQEKGAVLPQEISQVNQHHKSGFNDNSVKYQQRKHDPHRKFKEECKSPKAECWSQKMSNKQPNSGIENFLASLNISKENEVQSSHHGEPPSEEHLSPQSFAMGTRMLKEILKIDGSNTVDHKNEIKQIANEIPVSSNRRDEYGLPSQPKQNKKLASYMNKPHSANEYHNVQSMDNMCWPAPSQIPPVSTPVTELSRICSLVGMPQPDFSFLRMPQTMTVCQVKLSNGLLVHGPQCHSENEAKEKAALFALQQLGSLGMNFPLPSQVFANYPSAVPPGTIPPAFPPPTGWDHYGSNYALGAANIMPSSSHLFGSMPWGPSVPVPGKPFHHTLYSGTMPMAGGIPGGVHNQFIPLQVTKKRVANKKNFENKEAQSSQATPVQTSQPDSSNIVKVSPRESSSASLKSSPIAQPASSFQVETASQGHSISHHKSTPISSSRRKSRKLAVNFGVSKPSE

SEQ ID NO: 18808 - protein, 1239 aa, Artificial Sequence
  Synthetic polypeptide
SQHFGRPRRADHEIRRLRPSWLTRYYPYHYAPFLSDIHNISTLKIHFELGKPFKPFEQLLAVLPAASKNLLPACYQHLMTNEDSPIIEYYPPDFKTDLNGKQQEWEAVVLIPFIDEKRLLEAMETCNHSLKKEERKRNQHSECLMCWYDRDTEFIYPSPWPEKFPAIERCCTRYKIISLDAWRVDINKNKITRIDQKALYFCGFPTLKHIRHKFFLKKSGVQVFQQSSRGENMMLEILVDAESDELTVENVASSVLGKSVFVNWPHLEEARVVAVSDGETKFYLEEPPGTQKLYSGRTAPPSKVVHLGDKEQSNWAKEVQGISEHYLRRKGIIINETSAVVYAQLLTGRKYQINQNGEVRLEKQWSKQVVPFVYQTIVKDIRAFDSRFSNIKTLDDLFPLRSMVFMLGTPYYGCTGEVQDSGDVITEGRIRVIFSIPCEPNLDALIQNQHKYSIKYNPGYVLASRLGVSGYLVSRFTGSIFIGRGSRRNPHGDHKANVGLNLKFNKKNEEVPGYTKKVGSEWMYSSAAEQLLAEYLERAPELFSYIAKNSQEDVFYEDDIWPGENENGAEKVQEIITWLKGHPVSTLSRSSCDLQILDAAIVEKIEEEVEKCKQRKNNKKVRVTVKPHLLYRPLEQQHGVIPDRDAEFCLFDRVVNVRENFSVPVGLRGTIIGIKGANREADVLFEVLFDEEFPGGLTIRCSPGRGYRLPTSALVNLSHGSRSETGNQKLTAIVKPQPAVHQHSSSSSVSSGHLGALNHSPQSLFVPTQVPTKDDDEFCNIWQSLQGSGKMQYFQPTIQEKGAVLPQEISQVNQHHKSGFNDNSVKYQQRKHDPHRKFKEECKSPKAECWSQKMSNKQPNSGIENFLASLNISKENEVQSSHHGEPPSEEHLSPQSFAMKGTRMLKEILKIDGSNTVDHKNEIKQIANEIPVSSNRRDEYGLPSQPKQNKKLASYMNKPHSANEYHNVQSMDNMCWPAPSQIPPVSTPVTELSRICSLVGMPQPDFSFLRMPQTMTVCQVKLSNGLLVHGPQCHSENEAKEKAALFALQQLGSLGMNFPLPSQVFANYPSAVPPGTIPPAFPPPTANIMPSSSHLFGSMPWGPSVPVPGKPFHHTLYSGTMPMAGGIPGGVHNQFIPLQVTKKRVANKKNFENKEAQSSQATPVQTSQPDSSNIVKVSPRESSSASLKSSPIAQPASSFQVETASQGHSISHHKSTPISSSRRKSRKLAVNFGVSKPSE

SEQ ID NO: 18809 - protein, 76 aa, Artificial Sequence
  Synthetic polypeptide
ARWLTPVIPALWEAEDLQDIVATLGPRSATHPHQPAIQVLAQLAFLSQISQCIISQYIISQLELQGYHGCQRHSLH

SEQ ID NO: 18810 - protein, 217 aa, Artificial Sequence
  Synthetic polypeptide
GPPGYSGYPGPQVSYPPPPAGHSGPGPAGFPVPNQPVYNQPVYNQPVGAAGVPWMPAPQPPLNCPPGLEYLSQIDQILIHQQIELLEAEDTDCCTRNCCGPSRPFTLRIIDNMGQEVITLERPLRCSSCCCPCCLQEIEIQAPPGVPIGYVIQTWHPCLPKFTIQNEKREDVLKISGPCVVCSCCGDVDFEIKSLDEQCVVGKISKHWTGILREAFT

SEQ ID NO: 18811 - protein, 218 aa, Artificial Sequence
  Synthetic polypeptide
GPPGYSGYPGPQVSYPPPPAGHSGPGPAGFPVPNQPVYNQPVYNQPVGAAGVPWMPAPQPPLNCPPGLEYLSQIDQILIHQQIELLEVLTGFETNNKYEIKNSFGQRVYFAAEDTDCCTRNCCGPSRPFTLRIIDNMGQEVITLERPLRCSSCCCPCCLQEIEIQAPPGVPIGYVIQTWHPCLPKFTIQNEKREDVLKISGPCVVCSCCGDVDFEIKS

SEQ ID NO: 18812 - protein, 287 aa, Artificial Sequence
  Synthetic polypeptide
GPPGYSGYPGPQVSYPPPPAGHSGPGPAGFPVPNQPVYNQPVYNQPVGAAGVPWMPAPQPPLNCPPGLEYLSQIDQILIHQQIELLEVLTGFETNNKYEIKNSFGQRVYFAAEDTDCCTRNCCGPSRPFTLRIIDNMGQEVITLERPLRCSSCCCPCCLQEIEIQAPPGVPIGYVIQTWHPCLPKFTIQNEKREDVLKISGPCVVCSCCGDVDFEIKSLDEQCVVGKISKHWTGILREAFTDADNFGIQFPLDLDVKMKAVMIGACFLIDFMFFESTGSQEQKSGVW

SEQ ID NO: 18813 - protein, 12 aa, Artificial Sequence
  Synthetic polypeptide
SQHFGKLRTSRI

SEQ ID NO: 18814 - protein, 7 aa, Artificial Sequence
  Synthetic polypeptide
FHIMTHR

SEQ ID NO: 18815 - protein, 73 aa, Artificial Sequence
  Synthetic polypeptide
TGHKQHTSGVTVSHRSQMGPSNCRKTRSGLPLIPHYDSQMNASHPETNLPVGYPPQYPPTAFQDRSDTDSSAN

SEQ ID NO: 18816 - protein, 280 aa, Artificial Sequence
  Synthetic polypeptide
TGHKQHTSGVTVSHRSQMGPSNCRKTRSGLPLIPHYDSQMNASHPETNLPVGYPPQYPPTAFQGPPGYSGYPGPQVSYPPPPAGHSGPGPAGFPVPNQPVYNQPVYNQPVGAAGVPWMPAPQPPLNCPPGLEYLSQIDQILIHQQIELLEAEDTDCCTRNCCGPSRPFTLRIIDNMGQEVITLERPLRCSSCCCPCCLQEIEIQAPPGVPIGYVIQTWHPCLPKFTIQNEKREDVLKISGPCVVCSCCGDVDFEIKSLDEQCVVGKISKHWTGILREAFT

SEQ ID NO: 18817 - protein, 281 aa, Artificial Sequence
  Synthetic polypeptide
TGHKQHTSGVTVSHRSQMGPSNCRKTRSGLPLIPHYDSQMNASHPETNLPVGYPPQYPPTAFQGPPGYSGYPGPQVSYPPPPAGHSGPGPAGFPVPNQPVYNQPVYNQPVGAAGVPWMPAPQPPLNCPPGLEYLSQIDQILIHQQIELLEVLTGFETNNKYEIKNSFGQRVYFAAEDTDCCTRNCCGPSRPFTLRIIDNMGQEVITLERPLRCSSCCCPCCLQEIEIQAPPGVPIGYVIQTWHPCLPKFTIQNEKREDVLKISGPCVVCSCCGDVDFEIKS

SEQ ID NO: 18818 - protein, 350 aa, Artificial Sequence
  Synthetic polypeptide
TGHKQHTSGVTVSHRSQMGPSNCRKTRSGLPLIPHYDSQMNASHPETNLPVGYPPQYPPTAFQGPPGYSGYPGPQVSYPPPPAGHSGPGPAGFPVPNQPVYNQPVYNQPVGAAGVPWMPAPQPPLNCPPGLEYLSQIDQILIHQQIELLEVLTGFETNNKYEIKNSFGQRVYFAAEDTDCCTRNCCGPSRPFTLRIIDNMGQEVITLERPLRCSSCCCPCCLQEIEIQAPPGVPIGYVIQTWHPCLPKFTIQNEKREDVLKISGPCVVCSCCGDVDFEIKSLDEQCVVGKISKHWTGILREAFTDADNFGIQFPLDLDVKMKAVMIGACFLIDFMFFESTGSQEQKSGVW

SEQ ID NO: 18819 - protein, 45 aa, Artificial Sequence
  Synthetic polypeptide
DFGAIRFDCLSEFGTFMRLTDECFSPGNKLASWVSSSVSTDSIPR

SEQ ID NO: 18820 - protein, 49 aa, Artificial Sequence
  Synthetic polypeptide
DFGAIRFDCLSEFGTFMRLTDECFSPGNKLASWVSSSVSTDSIPRTSRI

SEQ ID NO: 18821 - protein, 37 aa, Artificial Sequence
  Synthetic polypeptide
DSQMNASHPETNLPVGYPPQYPPTAFQDRSDTDSSAN

SEQ ID NO: 18822 - protein, 244 aa, Artificial Sequence
  Synthetic polypeptide
DSQMNASHPETNLPVGYPPQYPPTAFQGPPGYSGYPGPQVSYPPPPAGHSGPGPAGFPVPNQPVYNQPVYNQPVGAAGVPWMPAPQPPLNCPPGLEYLSQIDQILIHQQIELLEAEDTDCCTRNCCGPSRPFTLRIIDNMGQEVITLERPLRCSSCCCPCCLQEIEIQAPPGVPIGYVIQTWHPCLPKFTIQNEKREDVLKISGPCVVCSCCGDVDFEIKSLDEQCVVGKISKHWTGILREAFT

SEQ ID NO: 18823 - protein, 245 aa, Artificial Sequence
  Synthetic polypeptide
DSQMNASHPETNLPVGYPPQYPPTAFQGPPGYSGYPGPQVSYPPPPAGHSGPGPAGFPVPNQPVYNQPVYNQPVGAAGVPWMPAPQPPLNCPPGLEYLSQIDQILIHQQIELLEVLTGFETNNKYEIKNSFGQRVYFAAEDTDCCTRNCCGPSRPFTLRIIDNMGQEVITLERPLRCSSCCCPCCLQEIEIQAPPGVPIGYVIQTWHPCLPKFTIQNEKREDVLKISGPCVVCSCCGDVDFEIKS

SEQ ID NO: 18824 - protein, 314 aa, Artificial Sequence
  Synthetic polypeptide
DSQMNASHPETNLPVGYPPQYPPTAFQGPPGYSGYPGPQVSYPPPPAGHSGPGPAGFPVPNQPVYNQPVYNQPVGAAGVPWMPAPQPPLNCPPGLEYLSQIDQILIHQQIELLEVLTGFETNNKYEIKNSFGQRVYFAAEDTDCCTRNCCGPSRPFTLRIIDNMGQEVITLERPLRCSSCCCPCCLQEIEIQAPPGVPIGYVIQTWHPCLPKFTIQNEKREDVLKISGPCVVCSCCGDVDFEIKSLDEQCVVGKISKHWTGILREAFTDADNFGIQFPLDLDVKMKAVMIGACFLIDFMFFESTGSQEQKSGVW

SEQ ID NO: 18825 - protein, 9 aa, Artificial Sequence
  Synthetic polypeptide
IWDFHETHR

SEQ ID NO: 18826 - protein, 83 aa, Artificial Sequence
  Synthetic polypeptide
IVASDESPTPAADGPQYPEPAEPPHSEPTRRAHEYAQCADHSAAAAAETAASENPDGERKDSNAPRGAHEAGSCPLSTAPHGS

SEQ ID NO: 18827 - protein, 202 aa, Artificial Sequence
  Synthetic polypeptide
WQVMNHQHQQQMAPSTLSQQNHPTQNPPAGLMSMPNALTTQQQQQQKLRLQRIQMERERIRMRQEELMRQEAALCRQLPMEAETLAPVQAAVNPPTMTPDMRSITNNSSDPFLNGGPYHSREQSTDSGLGLGCYSVPTTPEDFLSNVDEMDTGENAGQTPMNINPQQTRFPDFLDCLPGTNVDLGTLESEDLIPLFNDVESA

SEQ ID NO: 18828 - protein, 213 aa, Artificial Sequence
  Synthetic polypeptide
WQVMNHQHQQQMAPSTLSQQNHPTQNPPAGLMSMPNALTTQQQQQQKLRLQRIQMERERIRMRQEELMRQEAALCRQLPMEAETLAPVQAAVNPPTMTPDMRSITNNSSDPFLNGGPYHSREQSTDSGLGLGCYSVPTTPEDFLSNVDEMDTGENAGQTPMNINPQQTRFPDFLDCLPGTNVDLGTLESEDLIPLFNDVESALNKSEPFLTWL

SEQ ID NO: 18829 - protein, 28 aa, Artificial Sequence
  Synthetic polypeptide
AQEAEVAVSGDRAIVLHLGNYDFAWRKL

SEQ ID NO: 18830 - protein, 41 aa, Artificial Sequence
  Synthetic polypeptide
AQEAEVAVSGDRAIVLHLGNYDFAWRKLTRKLQNTSGWQHH

SEQ ID NO: 18831 - protein, 41 aa, Artificial Sequence
  Synthetic polypeptide
FQLLRTPRHENRLSPGGRGCSEWRSRHCTPPWKLRLCMEKV

SEQ ID NO: 18832 - protein, 536 aa, Artificial Sequence
  Synthetic polypeptide
FQLLRTPRHENRLSPGGRGCSEWRSRHCTPPWKLRLCMEKVDQKAPEYIRMAASLNAGETTYSLEHASDLRVEVQKVYELIDALSKKILTLGLNQDPPPHPSNLRLQRMIRYSATLFVQEKLLGLMSLPTKEQFEELKKKRKEEMERKRAVERQAALESQRRLEERQSGLASRAANGEVASLRRGPAPLRKAEGWLPLSGGQGQSEDSDPLLQQIHNITSFIRQAKAAGRMDEVRTLQENLRQLQDEYDQQQTEKAIELSRRQAEEEDLQREQLQMLRERELEREREQFRVASLHTRTRSLDFREIGPFQLEPSREPRTHLAYALDLGSSPVPSSTAPKTPSLSSTQPTRVWSGPPAVGQERLPQSSMPQQHEGPSLNPFDEEDLSSPMEEATTGPPAAGVSLDPSARILKEYNPFEEEDEEEEAVAGNPFIQPDSPAPNPFSEEDEHPQQRLSSPLVPGNPFEEPTCINPFEMDSDSGPEAEEPIEEELLLQQIDNIKAYIFDAKQCGRLDEVEVLTENLRELKHTLAKQKGGTD

SEQ ID NO: 18833 - protein, 163 aa, Artificial Sequence
  Synthetic polypeptide
FQLLRTPRHENRLSPGGRGCSEWRSRHCTPPWKLRLCMEKVDQKAPEYIRMAASLNAGETTYSLEHASDLRVEVQKVYELIDALSKKILTLGLNQDPPPHPSNLRLQRMIRYSATLFVQEKLLGLMSLPTKEQFEELKKKRKEEMERKRAVERQGLFFFQSFC

SEQ ID NO: 18834 - protein, 19 aa, Artificial Sequence
  Synthetic polypeptide
VEIAPLYSTLEITTLHGES

SEQ ID NO: 18835 - protein, 213 aa, Artificial Sequence
  Synthetic polypeptide
HIEDTVRSCVAKLFFTCSLKGHYCLYSKSSFILISQEPQPWIQIMFLFQQDLDQVQLHLEEVRFFDVFGFSETAGAWQCFMCNNPEKATVVNQDGQPLIEGKLKEKQVRWKFIKRWKTRYFTLAGNQLLFQKGKSKDDPDDCPIELSKVQSVKAVAKKRRDRSLPRAFEIFTDNKTYVFKAKDEKNAEEWLQCINVAVAQAKERESREVTTYL

SEQ ID NO: 18836 - protein, 258 aa, Artificial Sequence
  Synthetic polypeptide
HIEDTVRSCVAKLFFTCSLKGHYCLYSKSSFILISQEPQPWIQIMFLFQQSLFPEPLSIQSHSVQFLRALWEKTQAGGAHSFETAMMESTFPQQKDLDQVQLHLEEVRFFDVFGFSETAGAWQCFMCNNPEKATVVNQDGQPLIEGKLKEKQVRWKFIKRWKTRYFTLAGNQLLFQKGKSKDDPDDCPIELSKVQSVKAVAKKRRDRSLPRAFEIFTDNKTYVFKAKDEKNAEEWLQCINVAVAQAKERESREVTTYL

SEQ ID NO: 18837 - protein, 51 aa, Artificial Sequence
  Synthetic polypeptide
NMVHGPTTSTSPGYLLEIQILWLTLDLLNQHLQFHKTATSNQVFHNTLKTL

SEQ ID NO: 18838 - protein, 24 aa, Artificial Sequence
  Synthetic polypeptide
RHCEKLCSKVVLHLLPEGSLLPIQ

SEQ ID NO: 18839 - protein, 12 aa, Artificial Sequence
  Synthetic polypeptide
ISLTRSSLGPQQ

SEQ ID NO: 18840 - protein, 15 aa, Artificial Sequence
  Synthetic polypeptide
RGAPWVLSSEAGLPA

SEQ ID NO: 18841 - protein, 79 aa, Artificial Sequence
  Synthetic polypeptide
WLHDNVNFPNAELPGSSAVRLASLRDLPAQLLELYQQGFSLAALHPFVQPTHEREKTPLEHIFRAILIKKTDRKSHLCQ

SEQ ID NO: 18842 - protein, 76 aa, Artificial Sequence
  Synthetic polypeptide
WLHDNVNFPNAELPGSSAVRLASLRDLPAQLLELYQQGFSLAALHPFVQPTHEREKTPLEHIFRAILIKKTDRSQK

SEQ ID NO: 18843 - protein, 111 aa, Artificial Sequence
  Synthetic polypeptide
WLHDNVNFPNAELPGSSAVRLASLRDLPAQLLELYQQGFSLAALHPFVQPTHEREKTPLEHIFRAILIKKTDRSQKTDLHNEGYILELDCCSSLDHPTDQKLIPEFIKKIQ

SEQ ID NO: 18844 - protein, 237 aa, Artificial Sequence
  Synthetic polypeptide
WLHDNVNFPNAELPGSSAVRLASLRDLPAQLLELYQQGFSLAALHPFVQPTHEREKTPLEHIFRAILIKKTDRSQKTDLHNEGYILELDCCSSLDHPTDQKLIPEFIKKIQEAASQGLKFVGVIPQYHSSVNSAGSSAPVSTANSTEDARDAKNARGDHASLENEKPGTGDVCSAPAGRNQSPEPSSGPRGEVPLAKQPSSPSGEGDGGELSPQGVSKTLDGPESNPLEVHEEPLSG

SEQ ID NO: 18845 - protein, 540 aa, Artificial Sequence
  Synthetic polypeptide
WLHDNVNFPNAELPGSSAVRLASLRDLPAQLLELYQQGFSLAALHPFVQPTHEREKTPLEHIFRAILIKKTDRSQKTDLHNEGYILELDCCSSLDHPTDQKLIPEFIKKIQEAASQGLKFVGVIPQYHSSVNSAGSSAPVSTANSTEDARDAKNARGDHASLENEKPGTGDVCSAPAGRNQSPEPSSGPRGEVPLAKQPSSPSGEGDGGELSPQGVSKTLDGPESNPLEVHEEPLSGKMEIFTLFNKPKSHQKCRQYYPVTIPLHVSKNGQTVSGLDANWLEHMSDHFRKGGMLVNAVFYLGIVNDSLHGLTDGVFIFEAVSTEDSKTIQGYDAIVVEQWTVLEGVEVQTDYVPLLNSLAAYGWQLTCVLPTPVVKTTSEGSVSTKQIVFLQRPCLPQKIKKKESKFQWRFSREEMHNRQMRKSKGKLSARDKQQAEENEKNLEDQSSKAGDMGNCVSGQQQEGGVSEEMKGPVQEDKGEQLSPGGLLCGVGVEGEAVQNGPASHSRALVGICTGHSNPGEDARDGDAEEVRELGTVEEN

SEQ ID NO: 18846 - protein, 69 aa, Artificial Sequence
  Synthetic polypeptide
AELPGSSAVRLASLRDLPAQLLELYQQGFSLAALHPFVQPTHEREKTPLEHIFRAILIKKTDRKSHLCQ

SEQ ID NO: 18847 - protein, 66 aa, Artificial Sequence
  Synthetic polypeptide
AELPGSSAVRLASLRDLPAQLLELYQQGFSLAALHPFVQPTHEREKTPLEHIFRAILIKKTDRSQK

SEQ ID NO: 18848 - protein, 101 aa, Artificial Sequence
  Synthetic polypeptide
AELPGSSAVRLASLRDLPAQLLELYQQGFSLAALHPFVQPTHEREKTPLEHIFRAILIKKTDRSQKTDLHNEGYILELDCCSSLDHPTDQKLIPEFIKKIQ

SEQ ID NO: 18849 - protein, 227 aa, Artificial Sequence
  Synthetic polypeptide
AELPGSSAVRLASLRDLPAQLLELYQQGFSLAALHPFVQPTHEREKTPLEHIFRAILIKKTDRSQKTDLHNEGYILELDCCSSLDHPTDQKLIPEFIKKIQEAASQGLKFVGVIPQYHSSVNSAGSSAPVSTANSTEDARDAKNARGDHASLENEKPGTGDVCSAPAGRNQSPEPSSGPRGEVPLAKQPSSPSGEGDGGELSPQGVSKTLDGPESNPLEVHEEPLSG

SEQ ID NO: 18850 - protein, 530 aa, Artificial Sequence
  Synthetic polypeptide
AELPGSSAVRLASLRDLPAQLLELYQQGFSLAALHPFVQPTHEREKTPLEHIFRAILIKKTDRSQKTDLHNEGYILELDCCSSLDHPTDQKLIPEFIKKIQEAASQGLKFVGVIPQYHSSVNSAGSSAPVSTANSTEDARDAKNARGDHASLENEKPGTGDVCSAPAGRNQSPEPSSGPRGEVPLAKQPSSPSGEGDGGELSPQGVSKTLDGPESNPLEVHEEPLSGKMEIFTLFNKPKSHQKCRQYYPVTIPLHVSKNGQTVSGLDANWLEHMSDHFRKGGMLVNAVFYLGIVNDSLHGLTDGVFIFEAVSTEDSKTIQGYDAIVVEQWTVLEGVEVQTDYVPLLNSLAAYGWQLTCVLPTPVVKTTSEGSVSTKQIVFLQRPCLPQKIKKKESKFQWRFSREEMHNRQMRKSKGKLSARDKQQAEENEKNLEDQSSKAGDMGNCVSGQQQEGGVSEEMKGPVQEDKGEQLSPGGLLCGVGVEGEAVQNGPASHSRALVGICTGHSNPGEDARDGDAEEVRELGTVEEN

SEQ ID NO: 18851 - protein, 17 aa, Artificial Sequence
  Synthetic polypeptide
DLSGAPWVLSSEAGLPA

SEQ ID NO: 18852 - protein, 23 aa, Artificial Sequence
  Synthetic polypeptide
VRKKKTHMLKLLRSKRSSLGPQQ

SEQ ID NO: 18853 - protein, 146 aa, Artificial Sequence; identical to SEQ ID NO: 3147
  Synthetic polypeptide

SEQ ID NO: 18854 - protein, 104 aa, Artificial Sequence; identical to SEQ ID NO: 3563
  Synthetic polypeptide

SEQ ID NO: 18855 - protein, 54 aa, Artificial Sequence; identical to SEQ ID NO: 4955
  Synthetic polypeptide

SEQ ID NO: 18856 - protein, 22 aa, Artificial Sequence
  Synthetic polypeptide
QTRASLRHPGLTIWATCRPAAP

SEQ ID NO: 18857 - protein, 8 aa, Artificial Sequence
  Synthetic polypeptide
AHLDTGVT

SEQ ID NO: 18858 - protein, 370 aa, Artificial Sequence
  Synthetic polypeptide
TMSTLGHRSNLIHYLGLSHHLLALNFIIVSFGKKSAWSSAQVKVTDTDFDGVEVRVFEGPPKPEEPLKRSVVYIHGGGWALASAKIRYYDELCTAMAEELNAVIVSIEYRLVPKVYFPEQIHDVVRATKYFLKPEVLQKYMVDPGRICISGDSAGGNLAAALGQQFTQDASLKNKLKLQALIYPVLQALDFNTPSYQQNVNTPILPRYVMVKYWVDYFKGNYDFVQAMIVNNHTSLDVEEAAAVRARLNWTSLLPASFTKNYKPVVQTTGNARIVQELPQLLDARSAPLIADQAVLQLLPKTYILTCEHDVLRDDGIMYAKRLESAGVEVTLDHFEDGFHGCMIFTSWPTNFSVGIRTRNSYIKWLDQNL

SEQ ID NO: 18859 - protein, 246 aa, Artificial Sequence
  Synthetic polypeptide
TMSTLGHRSNLIHYLGLSHHLLALNFIIVSFGKKSAWSSAQVKVTDTDFDGVEVRVFEGPPKPEEPLKRSVVYIHGGGWALASASASWSPSDEIRYYDELCTAMAEELNAVIVSIEYRLVPKVYFPEQIHDVVRATKYFLKPEVLQKYMVDPGRICISGDSAGGNLAAALGQQFTQDASLKNKLKLQALIYPVLQALDFNTPSYQQNVNTPILPRYVMVKYWVDYFKGNYDFVQAMIVNNHTSLDV

SEQ ID NO: 18860 - protein, 378 aa, Artificial Sequence
  Synthetic polypeptide
TMSTLGHRSNLIHYLGLSHHLLALNFIIVSFGKKSAWSSAQVKVTDTDFDGVEVRVFEGPPKPEEPLKRSVVYIHGGGWALASASASWSPSDEIRYYDELCTAMAEELNAVIVSIEYRLVPKVYFPEQIHDVVRATKYFLKPEVLQKYMVDPGRICISGDSAGGNLAAALGQQFTQDASLKNKLKLQALIYPVLQALDFNTPSYQQNVNTPILPRYVMVKYWVDYFKGNYDFVQAMIVNNHTSLDVEEAAAVRARLNWTSLLPASFTKNYKPVVQTTGNARIVQELPQLLDARSAPLIADQAVLQLLPKTYILTCEHDVLRDDGIMYAKRLESAGVEVTLDHFEDGFHGCMIFTSWPTNFSVGIRTRNSYIKWLDQNL

SEQ ID NO: 18861 - protein, 46 aa, Artificial Sequence
  Synthetic polypeptide
VHVLCRDMDEAGNHHSEQTVARTENQTLHVLTHRWELNNEHTWTQE

SEQ ID NO: 18862 - protein, 980 aa, Artificial Sequence; identical to SEQ ID NO: 1548
  Synthetic polypeptide

SEQ ID NO: 18863 - protein, 937 aa, Artificial Sequence; identical to SEQ ID NO: 1577
  Synthetic polypeptide

SEQ ID NO: 18864 - protein, 92 aa, Artificial Sequence; identical to SEQ ID NO: 3717
  Synthetic polypeptide

SEQ ID NO: 18865 - protein, 75 aa, Artificial Sequence
  Synthetic polypeptide
CFRRRRNMSFIHQAELSQCSGWYGTKCEADALHKEKPDLRTNHQLLSFWELECDQENHLHCPWIQANRLPSCLDG

SEQ ID NO: 18866 - protein, 20 aa, Artificial Sequence
  Synthetic polypeptide
FWKKEIMLQTQKKHVLHSPG

SEQ ID NO: 18867 - protein, 409 aa, Artificial Sequence
  Synthetic polypeptide
MEKGNNASDAEETCPSFTRLSFHSAVVGTGLNVRLMLYTRKNLTCAQTINSSAFGNLNVTKKTTFIVHGFRPTGSPPVWMDDLVKGLLSVEDMNVVVVDWNRGATTLIYTHASSKTRKVAMVLKEFIDQMLAEGASLDDIYMIGVSLGAHISGFVGEMYDGWLGRITALGYKEPLGNIDFYPNGGLDQPGCPKTILGGFQYFKCDHQRSVYLYLSSLRESCTITAYPCDSYQDYRNGKCVSCGTSQKESCPLLGYYADNWKDHLRGKDPPMTKAFFDTAEESPFCMYHYFVDIITWNKNVRRGDITIKLRDKAGNTTESKINHEPTTFQKYHQVSLLARFNQDLDKVAAISLMFSTGSLIGPRYKLRILRMKLRSLAHPERPQLCRYDLVLMENVETVFQPILCPELQL

SEQ ID NO: 18868 - protein, 443 aa, Artificial Sequence
  Synthetic polypeptide
MEKGNNASDAEETCPSFTRLSFHSAVVGTGLNVRLMLYTRKNLTCAQTINSSAFGNLNVTKKTTFIVHGFRPTGSPPVWMDDLVKGLLSVEDMNVVVVDWNRGATTLIYTHASSKTRKVAMVLKEFIDQMLAEGASLDDIYMIGVSLGAHISGFVGEMYDGWLGRITGLDPAGPLFNGKPHQDRLDPSDAQFVDVIHSDTDALGYKEPLGNIDFYPNGGLDQPGCPKTILGGFQYFKCDHQRSVYLYLSSLRESCTITAYPCDSYQDYRNGKCVSCGTSQKESCPLLGYYADNWKDHLRGKDPPMTKAFFDTAEESPFCMYHYFVDIITWNKNVRRGDITIKLRDKAGNTTESKINHEPTTFQKYHQVSLLARFNQDLDKVAAISLMFSTGSLIGPRYKLRILRMKLRSLAHPERPQLCRYDLVLMENVETVFQPILCPELQL

SEQ ID NO: 18869 - protein, 4 aa, Artificial Sequence
  Synthetic polypeptide
LTLR

SEQ ID NO: 18870 - protein, 38 aa, Artificial Sequence
  Synthetic polypeptide
WLYKGLSPVLLSTYSYHHVKKDVFAFPSSMINAAMTGD

SEQ ID NO: 18871 - protein, 13 aa, Artificial Sequence
  Synthetic polypeptide
HKLLHVNAAMTGD

SEQ ID NO: 18872 - protein, 96 aa, Artificial Sequence
  Synthetic polypeptide
TVACERCDDWGLDTMRQIQVFEDEPARIKCPLFEHFLKFNYSTAHSAGLTLIWYWTRQDRDLEEPINFRLPENRISKEKDVLWFRPTLLNDTGNYT

SEQ ID NO: 18873 - protein, 128 aa, Artificial Sequence
  Synthetic polypeptide
TVACERCDDWGLDTMRQIQVFEDEPARIKCPLFEHFLKFNYSTAHSAGLTLIWYWTRQDRDLEEPINFRLPENRISKEKDVLWFRPTLLNDTGNYTCMLRNTTYCSKVAFPLEVVQKDSCFNSPMKLP

SEQ ID NO: 18874 - protein, 329 aa, Artificial Sequence
  Synthetic polypeptide
TVACERCDDWGLDTMRQIQVFEDEPARIKCPLFEHFLKFNYSTAHSAGLTLIWYWTRQDRDLEEPINFRLPENRISKEKDVLWFRPTLLNDTGNYTCMLRNTTYCSKVAFPLEVVQKDSCFNSPMKLPVHKLYIEYGIQRITCPNVDGYFPSSVKPTITWYMGCYKIQNFNNVIPEGMNLSFLIALISNNGNYTCVVTYPENGRTFHLTRTLTVKVVGSPKNAVPPVIHSPNDHVVYEKEPGEELLIPCTVYFSFLMDSRNEVWWTIDGKKPDDITIDVTINESASSKIHSGTGLWFWSHSPASGDSHCCLPCLLARDGPILPGSFWNR

SEQ ID NO: 18875 - protein, 339 aa, Artificial Sequence
  Synthetic polypeptide
TVACERCDDWGLDTMRQIQVFEDEPARIKCPLFEHFLKFNYSTAHSAGLTLIWYWTRQDRDLEEPINFRLPENRISKEKDVLWFRPTLLNDTGNYTCMLRNTTYCSKVAFPLEVVQKDSCFNSPMKLPVHKLYIEYGIQRITCPNVDGYFPSSVKPTITWYMGCYKIQNFNNVIPEGMNLSFLIALISNNGNYTCVVTYPENGRTFHLTRTLTVKVVGSPKNAVPPVIHSPNDHVVYEKEPGEELLIPCTVYFSFLMDSRNEVWWTIDGKKPDDITIDVTINESISHSRTEDETRTQILSIKKVTSEDLKRSYVCHARSAKGEVAKAAKVKQKGNRCGQ

SEQ ID NO: 18876 - protein, 553 aa, Artificial Sequence
  Synthetic polypeptide
TVACERCDDWGLDTMRQIQVFEDEPARIKCPLFEHFLKFNYSTAHSAGLTLIWYWTRQDRDLEEPINFRLPENRISKEKDVLWFRPTLLNDTGNYTCMLRNTTYCSKVAFPLEVVQKDSCFNSPMKLPVHKLYIEYGIQRITCPNVDGYFPSSVKPTITWYMGCYKIQNFNNVIPEGMNLSFLIALISNNGNYTCVVTYPENGRTFHLTRTLTVKVVGSPKNAVPPVIHSPNDHVVYEKEPGEELLIPCTVYFSFLMDSRNEVWWTIDGKKPDDITIDVTINESISHSRTEDETRTQILSIKKVTSEDLKRSYVCHARSAKGEVAKAAKVKQKVPAPRYTVELACGFGATVLLVVILIVVYHVYWLEMVLFYRAHFGTDETILDGKEYDIYVSYARNAEEEEFVLLTLRGVLENEFGYKLCIFDRDSLPGGIVTDETLSFIQKSRRLLVVLSPNYVLQGTQALLELKAGLENMASRGNINVILVQYKAVKETKVKELKRAKTVLTVIKWKGEKSKYPQGRFWKQLQVAMPVKKSPRRSSSDEQGLSYSSLKNV

SEQ ID NO: 18877 - protein, 670 aa, Artificial Sequence
  Synthetic polypeptide
TVACERCDDWGLDTMRQIQVFEDEPARIKCPLFEHFLKFNYSTAHSAGLTLIWYWTRQDRDLEEPINFRLPENRISKEKDVLWFRPTLLNDTGNYTCMLRNTTYCSKVAFPLEVVQKDSCFNSPMKLPVHKLYIEYGIQRITCPNVDGYFPSSVKPTITWYMGCYKIQNFNNVIPEGMNLSFLIALISNNGNYTCVVTYPENGRTFHLTRTLTVKVVGSPKNAVPPVIHSPNDHVVYEKEPGEELLIPCTVYFSFLMDSRNEVWWTIDGKKPDDITIDVTINESISHSRTEDETRTQILSIKKVTSEDLKRSYVCHARSAKGEVAKAAKVKQKVPAPRYTVELACGFGATVLLVVILIVVYHVYWLEMVLFYRAHFGTDETILDGKEYDIYVSYARNAEEEEFVLLTLRGVLENEFGYKLCIFDRDSLPGGNTVEAVFDFIQRSRRMIVVLSPDYVTEKSISMLEFKLGVMCQNSIATKLIVVEYRPLEHPHPGILQLKESVSFVSWKGEKSKHSGSKFWKALRLALPLRSLSASSGWNESCSSQSDISLDHVQRRRSRLKEPPELQSSERAAGSPPAPGTMSKHRGKSSATCRCCVTYCEGENHLRNKSRAEIHNQPQWETHLCKPVPQESETQWIQNGTRLEPPAPQISALALHHFTDLSNNNDFYIL

SEQ ID NO: 18878 - protein, 107 aa, Artificial Sequence
  Synthetic polypeptide
IQLIWLAKRVSPSSLTVSRDSFPKLRTQWKRTTICNRGGLVFCQGYRSSCAPLLEPPNKLSSASSKIHSGTGLWFWSHSPASGDSHCCLPCLLARDGPILPGSFWNR

SEQ ID NO: 18879 - protein, 32 aa, Artificial Sequence
  Synthetic polypeptide
LCSPARTSKQALKCQLQDTQWNWLVVLEPQSC

SEQ ID NO: 18880 - protein, 53 aa, Artificial Sequence
  Synthetic polypeptide
NLQTSSQVPAPRYTVELACGFGATVLLVVILIVVYHVYWLEMVLFYRAHFGTD

SEQ ID NO: 18881 - protein, 227 aa, Artificial Sequence
  Synthetic polypeptide
NLQTSSQVPAPRYTVELACGFGATVLLVVILIVVYHVYWLEMVLFYRAHFGTDETILDGKEYDIYVSYARNAEEEEFVLLTLRGVLENEFGYKLCIFDRDSLPGGIVTDETLSFIQKSRRLLVVLSPNYVLQGTQALLELKAGLENMASRGNINVILVQYKAVKETKVKELKRAKTVLTVIKWKGEKSKYPQGRFWKQLQVAMPVKKSPRRSSSDEQGLSYSSLKNV

SEQ ID NO: 18882 - protein, 344 aa, Artificial Sequence
  Synthetic polypeptide
NLQTSSQVPAPRYTVELACGFGATVLLVVILIVVYHVYWLEMVLFYRAHFGTDETILDGKEYDIYVSYARNAEEEEFVLLTLRGVLENEFGYKLCIFDRDSLPGGNTVEAVFDFIQRSRRMIVVLSPDYVTEKSISMLEFKLGVMCQNSIATKLIVVEYRPLEHPHPGILQLKESVSFVSWKGEKSKHSGSKFWKALRLALPLRSLSASSGWNESCSSQSDISLDHVQRRRSRLKEPPELQSSERAAGSPPAPGTMSKHRGKSSATCRCCVTYCEGENHLRNKSRAEIHNQPQWETHLCKPVPQESETQWIQNGTRLEPPAPQISALALHHFTDLSNNNDFYIL

SEQ ID NO: 18883 - protein, 62 aa, Artificial Sequence
  Synthetic polypeptide
GKLPDPPRELWGRELLVAWPEHTDAVCGALPSQRGDLRGRPVGPGHQPAPAEQLHPHRAWRQ

SEQ ID NO: 18884 - protein, 142 aa, Artificial Sequence
  Synthetic polypeptide
PWTGHVACCSSFQRASLFANHRESCLTHLESCGAENYWWRGQNTRTLCVGPFPRNVVTSVAGLSAQDISQPLQNSFIHTGHGDSDPRHCWGFPDRIDECPFSAFSPGHPPAETCGQVLWTGRREACASDPRLHPVSSRTKGL

SEQ ID NO: 18885 - protein, 169 aa, Artificial Sequence
  Synthetic polypeptide
PWTGHVACCSSFQRASLFANHRESCLTHLESCGAENYWWRGQNTRTLCVGPFPRNVVTSVAGLSAQDISQPLQNSFIHTGHGDSDPRHCWGFPDRIDELYLGNPMDPPDLLSVELSTSRPPQHLGGVKKPTYDPVSEDQDPLSSDFKRLGLRKPGLPRGLWLAKPSARV

SEQ ID NO: 18886 - protein, 246 aa, Artificial Sequence
  Synthetic polypeptide
PWTGHVACCSSFQRASLFANHRESCLTHLESCGAENYWWRGQNTRTLCVGPFPRNVVTSVAGLSAQDISQPLQNSFIHTGHGDSDPRHCWGFPDRIDELYLGNPMDPPDLLSVELSTSRPPQHLGGVKKPTYDPVSEDQDPLSSDFKRLGLRKPGLPRGLWLAKPSARVPGTKASRGSGAEVTLIDFGEEPVVPALRPCAPSLAQLAMDACSLLDETPPQSPTRALPRPLHPTPVVDWDARPLPPP

SEQ ID NO: 18887 - protein, 652 aa, Artificial Sequence
  Synthetic polypeptide
PWTGHVACCSSFQRASLFANHRESCLTHLESCGAENYWWRGQNTRTLCVGPFPRNVVTSVAGLSAQDISQPLQNSFIHTGHGDSDPRHCWGFPDRIDELYLGNPMDPPDLLSVELSTSRPPQHLGGVKKPTYDPVSEDQDPLSSDFKRLGLRKPGLPRGLWLAKPSARVPGTKASRGSGAEVTLIDFGEEPVVPALRPCAPSLAQLAMDACSLLDETPPQSPTRALPRPLHPTPVVDWDARPLPPPPAYDDVAQDEDDFEICSINSTLVGAGVPAGPSQGQTNYAFVPEQARPPPPLEDNLFLPPQGGGKPPSSAQTAEIFQALQQECMRQLQAPAGSPAPSPSPGGDDKPQVPPRVPIPPRPTRPHVQLSPAPPGEEETSQWPGPASPPRVPPREPLSPQGSRTPSPLVPPGSSPLPPRLSSSPGKTMPTTQSFASDPKYATPQVIQAPGPRAGPCILPIVRDGKKVSSTHYYLLPERPSYLERYQRFLREAQSPEEPTPLPVPLLLPPPSTPAPAAPTATVRPMPQAALDPKANFSTNNSNPGARPPPPRATARLPQRGCPGDGPEAGRPADKIQMAMVHGVTTEECQAALQCHGWSVQRAAQYLKVEQLFGLGLRPRGECHKVLEMFDWNLEQAGCHLLGSWGPAHHKR

SEQ ID NO: 18888 - protein, 622 aa, Artificial Sequence
  Synthetic polypeptide
PWTGHVACCSSFQRASLFANHRESCLTHLESCGAENYWWRGQNTRTLCVGPFPRNVVTSVAGLSAQDISQPLQNSFIHTGHGDSDPRHCWGFPDRIDELYLGNPMDPPDLLSVELSTSRPPQHLGGVKKPTYDPVSEDQDPLSSDFKRLGLRKPGLPRGLWLAKPSARVPGTKASRGSGAEVTLIDFGEEPVVPALRPCAPSLAQLAMDACSLLDETPPQSPTRALPRPLHPTPVVDWDARPLPPPPAYDDVAQDEDDFEICSINSTLVGAGVPAGPSQGQTNYAFVPEQARPPPPLEDNLFLPPQGGGKPPSSAQTAEIFQALQQECMRQLQAPAGSPAPSPSPGGDDKPQVPPRVPIPPRPTRPHVQLSPAPPGEEETSQWPGPASPPRVPPREPLSPQGSRTPSPLVPPGSSPLPPRLSSSPGKTMPTTQSFASDPKYATPQVIQAPGPRAGPCILPIVRDGKKVSSTHYYLLPERPSYLERYQRFLREAQSPEEPTPLPVPLLLPPPSTPAPAAPTATVRPMPQAALDPKANFSTNNSNPGARPPPPRATARLPQRGCPGDGPEAGRPADKIQMVEQLFGLGLRPRGECHKVLEMFDWNLEQAGCHLLGSWGPAHHKR

SEQ ID NO: 18889 - protein, 637 aa, Artificial Sequence
  Synthetic polypeptide
PWTGHVACCSSFQRASLFANHRESCLTHLESCGAENYWWRGQNTRTLCVGPFPRNVVTSVAGLSAQDISQPLQNSFIHTGHGDSDPRHCWGFPDRIDELYLGNPMDPPDLLSVELSTSRPPQHLGGVKREPPPRPPQPAFFTQKPTYDPVSEDQDPLSSDFKRLGLRKPGLPRGLWLAKPSARVPGTKASRGSGAEVTLIDFGEEPVVPALRPCAPSLAQLAMDACSLLDETPPQSPTRALPRPLHPTPVVDWDARPLPPPPAYDDVAQDEDDFEICSINSTLVGAGVPAGPSQGQTNYAFVPEQARPPPPLEDNLFLPPQGGGKPPSSAQTAEIFQALQQECMRQLQAPAGSPAPSPSPGGDDKPQVPPRVPIPPRPTRPHVQLSPAPPGEEETSQWPGPASPPRVPPREPLSPQGSRTPSPLVPPGSSPLPPRLSSSPGKTMPTTQSFASDPKYATPQVIQAPGPRAGPCILPIVRDGKKVSSTHYYLLPERPSYLERYQRFLREAQSPEEPTPLPVPLLLPPPSTPAPAAPTATVRPMPQAALDPKANFSTNNSNPGARPPPPRATARLPQRGCPGDGPEAGRPADKIQMVEQLFGLGLRPRGECHKVLEMFDWNLEQAGCHLLGSWGPAHHKR

SEQ ID NO: 18890 - protein, 27 aa, Artificial Sequence
  Synthetic polypeptide
RVVGPRTTGGVARTHGRCVWGPSLATW

SEQ ID NO: 18891 - protein, 22 aa, Artificial Sequence
  Synthetic polypeptide
FNKHYRYQQLQGFCQPTVVYAY

SEQ ID NO: 18892 - protein, 276 aa, Artificial Sequence; identical to SEQ ID NO: 2575
  Synthetic polypeptide

SEQ ID NO: 18893 - protein, 27 aa, Artificial Sequence
  Synthetic polypeptide
QALQVPATSRFLPAHCCIRLLRKQCKM

SEQ ID NO: 18894 - protein, 24 aa, Artificial Sequence
  Synthetic polypeptide
NPVSTENTKISQPWALWNLPSLAS

SEQ ID NO: 18895 - protein, 198 aa, Artificial Sequence
  Synthetic polypeptide
PALGPVELALTSILTLLALGSIAIFLEDAVYLYKNTLCPIKRRTLLWKSSAPTLATFKERCLECVGFASCVLAAKGFRSLRVSLPPSPAPAPSEQVVSVLCCFGLWIPRSLVLVEMTITSFYAVCFYLLMLVMVEGFGGKEAVLRTLRDTPMMVHTGPCCCCCPCCPRLLLTRKKLQLLMLGPFQYAFLKITLTLVGL

SEQ ID NO: 18896 - protein, 297 aa, Artificial Sequence
  Synthetic polypeptide
PALGPVELALTSILTLLALGSIAIFLEDAVYLYKNTLCPIKRRTLLWKSSAPTVVSVLCCFGLWIPRSLVLVEMTITSFYAVCFYLLMLVMVEGFGGKEAVLRTLRDTPMMVHTGPCCCCCPCCPRLLLTRKKLQLLMLGPFQYAFLKITLTLVGLFLVPDGIYDPADISEGSTALWINTFLGVSTLLALWTLGIISRQARLHLGEQNMGAKFALFQVLLILTALQPSIFSVLANGGQIACSPPYSSKTRSQVMNCHLLILETFLMTVLTRMYYRRKDHKVGYETFSSPDLDLNLKA

SEQ ID NO: 18897 - protein, 47 aa, Artificial Sequence
  Synthetic polypeptide
SQHFGRPRQADHLRSRVQDQPGQCGEILSLLKIQKLASPGPCGTCPH

SEQ ID NO: 18898 - protein, 134 aa, Artificial Sequence
  Synthetic polypeptide
AETAGSGGGSGGPRAGCCPSCGAAPWCASTGTAACTAMRTARCGGACAPAAWQKRLCARTSCATCPATRPRYVLFNMPSALMTAPGMSTLRRMALLYIETPLLRALMVQGPRLVSVRAAMHGKCGGRALWALWQ

SEQ ID NO: 18899 - protein, 237 aa, Artificial Sequence
  Synthetic polypeptide
GRLLSELRSCALVCKHWYRCLHGDENSEVWRSLCARSLAEEALRTDILCNLPSYKAKIRAFQHAFSTNDCSRNVYIKKNGFTLHRNPIAQSTDGARTKIGFSEGRHAWEVWWEGPLGTVAVIGIATKRAPMQCQGYVALLGSDDQSWGWNLVDNNLLHNGEVNGSFPQCNNAPKYQIGERIRVILDMEDKTLAFERGYEFLGVAFRGLPKVCLYPAVSAVYGNTEVTLVYLGKPLDG

SEQ ID NO: 18900 - protein, 37 aa, Artificial Sequence
  Synthetic polypeptide
QRRREAAAAAAALGPAAVRAAELRPGVQALVPLPARR

SEQ ID NO: 18901 - protein, 131 aa, Artificial Sequence
  Synthetic polypeptide
AQELETSLGNMMKPHLYKIQESVRWVEPLTAEGRASLRCPAASRPTPGCSPWMPTLSRPCGITPSSLTLSWRASACTAATWSASAAAPSRSKVTCAAWSWGTTASQRTTKRRQPPSTPCRACGGWTCQETP

SEQ ID NO: 18902 - protein, 16 aa, Artificial Sequence
  Synthetic polypeptide
NHISTKYKNQSGGWSR

SEQ ID NO: 18903 - protein, 673 aa, Artificial Sequence
  Synthetic polypeptide
PGQHDETTSLQNTRISQVGGAADCRGQSLASVPSSLPPHARMLTLDANPLKTLWNHSLQPYPLLESLSLHSCHLERISRGAFQEQGHLRSLVLGDNCLSENYEETAAALHALPGLRRLDLSGNALTEDMAALMLQNLSSLRSVSLAGNTIMRLDDSVFEGLERLRELDLQRNYIFEIEGGAFDGLAELRHLNLAFNNLPCIVDFGLTRLRVLNVSYNVLEWFLATGGEAAFELETLDLSHNQLLFFPLLPQYSKLRTLLLRDNNMGFYRDLYNTSSPREMVAQFLLVDGNVTNITTVSLWEEFSSSDLADLRFLDMSQNQFQYLPDGFLRKMPSLSHLNLHQNCLMTLHIREHEPPGALTELDLSHNQLSELHLAPGLASCLGSLRLFNLSSNQLLGVPPGLFANARNITTLDMSHNQISLCPLPAASDRVGPPSCVDFRNMASLRSLSLEGCGLGALPDCPFQGTSLTYLDLSSNWGVLNGSLAPLQDVAPMLQVLSLRNMGLHSSFMALDFSGFGNLRDLDLSGNCLTTFPRFGGSLALETLDLRRNSLTALPQKAVSEQLSRGLRTIYLSQNPYDCCGVDGWGALQHGQTVADWAMVTCNLSSKIIRVTELPGGVPRDCKWERLDLGLLYLVLILPSCLTLLVACTVIVLTFKKPLLQVIKSRCHWSSVY

SEQ ID NO: 18904 - protein, 669 aa, Artificial Sequence
  Synthetic polypeptide
AEITPLHSSLGDRVGGAADCRGQSLASVPSSLPPHARMLTLDANPLKTLWNHSLQPYPLLESLSLHSCHLERISRGAFQEQGHLRSLVLGDNCLSENYEETAAALHALPGLRRLDLSGNALTEDMAALMLQNLSSLRSVSLAGNTIMRLDDSVFEGLERLRELDLQRNYIFEIEGGAFDGLAELRHLNLAFNNLPCIVDFGLTRLRVLNVSYNVLEWFLATGGEAAFELETLDLSHNQLLFFPLLPQYSKLRTLLLRDNNMGFYRDLYNTSSPREMVAQFLLVDGNVTNITTVSLWEEFSSSDLADLRFLDMSQNQFQYLPDGFLRKMPSLSHLNLHQNCLMTLHIREHEPPGALTELDLSHNQLSELHLAPGLASCLGSLRLFNLSSNQLLGVPPGLFANARNITTLDMSHNQISLCPLPAASDRVGPPSCVDFRNMASLRSLSLEGCGLGALPDCPFQGTSLTYLDLSSNWGVLNGSLAPLQDVAPMLQVLSLRNMGLHSSFMALDFSGFGNLRDLDLSGNCLTTFPRFGGSLALETLDLRRNSLTALPQKAVSEQLSRGLRTIYLSQNPYDCCGVDGWGALQHGQTVADWAMVTCNLSSKIIRVTELPGGVPRDCKWERLDLGLLYLVLILPSCLTLLVACTVIVLTFKKPLLQVIKSRCHWSSVY

SEQ ID NO: 18905 - protein, 6 aa, Artificial Sequence
  Synthetic polypeptide
QGGWSR

SEQ ID NO: 18906 - protein, 142 aa, Artificial Sequence
  Synthetic polypeptide
SQLLGRLKQENCSNPGGRDCSELRSHHCTPAWVTGWVEPLTAEGRASLRCPAASRPTPGCSPWMPTLSRPCGITPSSLTLSWRASACTAATWSASAAAPSRSKVTCAAWSWGTTASQRTTKRRQPPSTPCRACGGWTCQETP

SEQ ID NO: 18907 - protein, 64 aa, Artificial Sequence
  Synthetic polypeptide
AKIVAPHSSLGNREVKRKKRNGQKFLLHLILSTPSMLALMLLLENSLACQNSGLDYYRPPISPN

SEQ ID NO: 18908 - protein, 483 aa, Artificial Sequence
  Synthetic polypeptide
IREVEVTVSQDRGTALQPGEQGSKKKEKERPEISPPSDFEHTIHVGFDAVTGEFTGMPEQWARLLQTSNITKLEQKKNPQAVLDVLKFYDSNTVKQKYLSFTPPEKDGFPSGTPALNAKGTEAPAVVTEEEDDDEETAPPVIAPRPDHTKSIYTRSVIDPVPAPVGDSHVDGAAKSLDKQKKKTKMTDEEIMEKLRTIVSIGDPKKKYTRYEKIGQGASGTVFTATDVALGQEVAIKQINLQKQPKKELIINEILVMKELKNPNIVNFLDSYLVGDELFVVMEYLAGGSLTDVVTETCMDEAQIAAVCRECLQALEFLHANQVIHRDIKSDNVLLGMEGSVKLTDFGFCAQITPEQSKRSTMVGTPYWMAPEVVTRKAYGPKVDIWSLGIMAIEMVEGEPPYLNENPLRALYLIATNGTPELQNPEKLSPIFRDFLNRCLEMDVEKRGSAKELLQHPFLKLAKPLSSLTPLIMAAKEAMKSNR

SEQ ID NO: 18909 - protein, 36 aa, Artificial Sequence
  Synthetic polypeptide
SQLLGRLRQENHLNTGGGGYSEPRSWHRTPAWGTGK

SEQ ID NO: 18910 - protein, 96 aa, Artificial Sequence
  Synthetic polypeptide
RPPIHGHGILSALLQPLAPTPRLYPMATALAQVPSFAWTIAVVYKAAPLPALVCALHSRDPEVWRHGRGLPPAAAQARDPVRVSQVPPTLHGADPG

SEQ ID NO: 18911 - protein, 102 aa, Artificial Sequence
  Synthetic polypeptide
SPPHPRPWHPVSSSTASRSYSPPLPHGYSPGAGAIFRLDYCSSLQGCPPTCAGVCSPLPRSRSVETWPWPSAGSGSSQRSSACQPSPPNTAWSGSRLSRSTL

SEQ ID NO: 18912 - protein, 380 aa, Artificial Sequence
  Synthetic polypeptide
STRLPPYLRWCVLSTPEIQKCGDMAVAFRRQRLKPEIQCVSAKSPQHCMERIQAEQVDAVTLSGEDIYTAGKTYGLVPAAGEHYAPEDSSNSYYVVAVVRRDSSHAFTLDELRGKRSCHAGFGSPAGWDVPVGALIQRGFIRPKDCDVLTAVSEFFNASCVPVNNPKNYPSSLCALCVGDEQGRNKCVGNSQERYYGYRGAFRCLVENAGDVAFVRHTTVFDNTNGHNSEPWAAELRSEDYELLCPNGARAEVSQFAACNLAQIPPHAVMVRPDTNIFTVYGLLDKAQDLFGDDHNKNGFKMFDSSNYHGQDLLFKDATVRAVPVGEKTTYRGWLGLDYVAALEGMSSQQCSGAAAPAPGAPLLPLLLPALAARLLPPAL

SEQ ID NO: 18913 - protein, 131 aa, Artificial Sequence
  Synthetic polypeptide
GQVWRLTPVIPALWEAEGRRFPPGARPCCHRTSSCCAGMVAGPMSPSGGSAIWPGCLLTPWWSGPTQMGASSSGCSTKASVCSATRAAASRCSALRPMARRIYSSKTLPRSLCPSPHRPMRRGWAMSTCTP

SEQ ID NO: 18914 - protein, 517 aa, Artificial Sequence
  Synthetic polypeptide
PGVEAHACNPSTLGGRGKTLPSWGQALLSQDFELLCRDGSRADVTEWRQCHLARVPAHAVVVRADTDGGLIFRLLNEGQRLFSHEGSSFQMFSSEAYGQKDLLFKDSTSELVPIATQTYEAWLGHEYLHAMKGLLCDPNRLPPYLRWCVLSTPEIQKCGDMAVAFRRQRLKPEIQCVSAKSPQHCMERIQAEQVDAVTLSGEDIYTAGKTYGLVPAAGEHYAPEDSSNSYYVVAVVRRDSSHAFTLDELRGKRSCHAGFGSPAGWDVPVGALIQRGFIRPKDCDVLTAVSEFFNASCVPVNNPKNYPSSLCALCVGDEQGRNKCVGNSQERYYGYRGAFRCLVENAGDVAFVRHTTVFDNTNGHNSEPWAAELRSEDYELLCPNGARAEVSQFAACNLAQIPPHAVMVRPDTNIFTVYGLLDKAQDLFGDDHNKNGFKMFDSSNYHGQDLLFKDATVRAVPVGEKTTYRGWLGLDYVAALEGMSSQQCSGAAAPAPGAPLLPLLLPALAARLLPPAL

SEQ ID NO: 18915 - protein, 30 aa, Artificial Sequence
  Synthetic polypeptide
SQHFGRPREDASLLGPGPAVTGLRAAVPGW

SEQ ID NO: 18916 - protein, 26 aa, Artificial Sequence
  Synthetic polypeptide
KPVPLSCFKGGNFEKAQGTKTRACNF

SEQ ID NO: 18917 - protein, 283 aa, Artificial Sequence
  Synthetic polypeptide
TELMRVQWKFGRMQLSHHLRKARNKNPCRFHALREVILKKLKGLKLEHVTSNASDSESSYLILITDEYGCSKGGQEEYVLSYEPVNQQEVNYTRPVIILGPMKDRINDDLISEFPDKFGSCVPHTTRPKRDYEVDGRDYHFVTSREQMEKDIQEHKFIEAGQYNNHLYGTSVQSVREVAEKGKHCILDVSGNAIKRLQIAQLYPISIFIKPKSMENIMEMNKRLTEEQARKTFERAMKLEQEFTEHFTAIVQGDTLEDIYNQVKQIIEEQSGSYIWVPAKEKL

SEQ ID NO: 18918 - protein, 271 aa, Artificial Sequence
  Synthetic polypeptide
TELMRVQWKFGRMQLSHHLRKARNKNPCRFHALREVILKKLKGLKLEHVTSNASDSESSYRGQEEYVLSYEPVNQQEVNYTRPVIILGPMKDRINDDLISEFPDKFGSCVPHTTRPKRDYEVDGRDYHFVTSREQMEKDIQEHKFIEAGQYNNHLYGTSVQSVREVAEKGKHCILDVSGNAIKRLQIAQLYPISIFIKPKSMENIMEMNKRLTEEQARKTFERAMKLEQEFTEHFTAIVQGDTLEDIYNQVKQIIEEQSGSYIWVPAKEKL

SEQ ID NO: 18919 - protein, 6 aa, Artificial Sequence
  Synthetic polypeptide
AWQLQS

SEQ ID NO: 18920 - protein, 21 aa, Artificial Sequence
  Synthetic polypeptide
VLHLQHVSMATTELRRKNEPD

SEQ ID NO: 18921 - protein, 284 aa, Artificial Sequence
  Synthetic polypeptide
VSSAPPTCKHGNYRVEKKERARLKTVKFNSKTRDKGEIPDDMGSKGLKHVTSNASDSESSYLILITDEYGCSKGGQEEYVLSYEPVNQQEVNYTRPVIILGPMKDRINDDLISEFPDKFGSCVPHTTRPKRDYEVDGRDYHFVTSREQMEKDIQEHKFIEAGQYNNHLYGTSVQSVREVAEKGKHCILDVSGNAIKRLQIAQLYPISIFIKPKSMENIMEMNKRLTEEQARKTFERAMKLEQEFTEHFTAIVQGDTLEDIYNQVKQIIEEQSGSYIWVPAKEKL

SEQ ID NO: 18922 - protein, 272 aa, Artificial Sequence
  Synthetic polypeptide
VSSAPPTCKHGNYRVEKKERARLKTVKFNSKTRDKGEIPDDMGSKGLKHVTSNASDSESSYRGQEEYVLSYEPVNQQEVNYTRPVIILGPMKDRINDDLISEFPDKFGSCVPHTTRPKRDYEVDGRDYHFVTSREQMEKDIQEHKFIEAGQYNNHLYGTSVQSVREVAEKGKHCILDVSGNAIKRLQIAQLYPISIFIKPKSMENIMEMNKRLTEEQARKTFERAMKLEQEFTEHFTAIVQGDTLEDIYNQVKQIIEEQSGSYIWVPAKEKL

SEQ ID NO: 18923 - protein, 294 aa, Artificial Sequence
  Synthetic polypeptide
VSSAPPTCKHGNYRVEKKERARLKTVKFNSKTRDKGQSFNDKRKKNLFSRKFPFYKNKDQSEQETSDADQHVTSNASDSESSYRGQEEYVLSYEPVNQQEVNYTRPVIILGPMKDRINDDLISEFPDKFGSCVPHTTRPKRDYEVDGRDYHFVTSREQMEKDIQEHKFIEAGQYNNHLYGTSVQSVREVAEKGKHCILDVSGNAIKRLQIAQLYPISIFIKPKSMENIMEMNKRLTEEQARKTFERAMKLEQEFTEHFTAIVQGDTLEDIYNQVKQIIEEQSGSYIWVPAKEKL

SEQ ID NO: 18924 - protein, 9 aa, Artificial Sequence
  Synthetic polypeptide
GFTDSAAFL

SEQ ID NO: 18925 - protein, 166 aa, Artificial Sequence
  Synthetic polypeptide
GFTDSAAFLTQTVCLDDTTVKFEIWDTAGQERYHSLAPMYYRGAQAAIVVYDITNEESFARAKNWVKELQRQASPNIVIALSGNKADLANKRAVDFQEAQSYADDNSLLFMETSAKTSMNVNEIFMAIAKKLPKNEPQNPGANSARGRGVDLTEPTQPTRNQCCSN

SEQ ID NO: 18926 - protein, 8 aa, Artificial Sequence
  Synthetic polypeptide
VLQIQLLF

SEQ ID NO: 18927 - protein, 9 aa, Artificial Sequence
  Synthetic polypeptide
WFYRFSCFS

SEQ ID NO: 18928 - protein, 15 aa, Artificial Sequence
  Synthetic polypeptide
WFYRFSCFSNPNCMS

SEQ ID NO: 18929 - protein, 9 aa, Artificial Sequence
  Synthetic polypeptide
DHAIALQPS

SEQ ID NO: 18930 - protein, 48 aa, Artificial Sequence
  Synthetic polypeptide
TEITPLHSSLAKKLPKNEPQNPGANSARGRGVDLTEPTQPTRNQCCSN

SEQ ID NO: 18931 - protein, 28 aa, Artificial Sequence
  Synthetic polypeptide
KNNLSQSWWLTPVIPALWEAEAGRSSES

SEQ ID NO: 18932 - protein, 40 aa, Artificial Sequence
  Synthetic polypeptide
SQHFGRLKRADHLSPDKPVSVKISFEDEPRKKYVDAETSL

SEQ ID NO: 18933 - protein, 5 aa, Artificial Sequence
  Synthetic polypeptide
VLINL

SEQ ID NO: 18934 - protein, 28 aa, Artificial Sequence
  Synthetic polypeptide
IIEEICKNVKQRVLMKKLLWILAKLAQL

SEQ ID NO: 18935 - protein, 1195 aa, Artificial Sequence
  Synthetic polypeptide
KCKTEGPDEEAVVDLGKTSSTVNTKFEKEELESHRAVYIGVHVPFSKESRRRHRHRGHKHHHRRRKDKESDKEDGRESPSYDTPSQRVQFILGTEDDDEEHIPHDLFTEMDELCYRDGEEYEWKETARWLKFEEDVEDGGDRWSKPYVATLSLHSLFELRSCILNGTVMLDMRASTLDEIADMVLDNMIASGQLDESIRENVREALLKRHHHQNEKRFTSRIPLVRSFADIGEGLSASRHSLRTGLSASNLSLRGESPLSLLLGHLLPSSRAGTPAGSRCTTPVPTPQNSPPSSPSISRLTSRSSQESQRQAPELLVSPASDDIPTVVIHPPEEDLEAALKGEEQKNEENVDLTPGILASPQSAPGNLDNSKSGEIKGNGSGGSRENSTVDFSKVDMNFMRKIPTGAEASNVLVGEVDFLERPIIAFVRLAPAVLLTGLTEVPVPTRFLFLLLGPAGKAPQYHEIGRSIATLMTDEIFHDVAYKAKDRNDLLSGIDEFLDQVTVLPPGEWDPSIRIEPPKSVPSQEKRKIPVFHNGSTPTLGETPKEAAHHAGPELQRTGRLFGGLILDIKRKAPFFLSDFKDALSLQCLASILFLYCACMSPVITFGGLLGEATEGRISAIESLFGASLTGIAYSLFAGQPLTILGSTGPVLVFEKILYKFCRDYQLSYLSLRTSIGLWTSFLCIVLVATDASSLVCYITRFTEEAFAALICIIFIYEALEKLFDLGETYAFNMHNNLDKLTSYSCVCTEPPNPSNETLAQWKKDNITAHNISWRNLTVSECKKLRGVFLGSACGHHGPYIPDVLFWCVILFFTTFFLSSFLKQFKTKRYFPTKVRSTISDFAVFLTIVIMVTIDYLVGVPSPKLHVPEKFEPTHPERGWIISPLGDNPWWTLLIAAIPALLCTILIFMDQQITAVIINRKEHKLKKGAGYHLDLLMVGVMLGVCSVMGLPWFVAATVLSISHVNSLKVESECSAPGEQPKFLGIREQRVTGLMIFILMGLSVFMTSVLKFIPMPVLYGVFLYMGVSSLKGIQLFDRIKLFGMPAKHQPDLIYLRYVPLWKVHIFTVIQLTCLVLLWVIKVSAAAVVFPMMVLALVFVRKLMDLCFTKRELSWLDDLMPESKKKKEDDKKKKEKEEAERMLQDDDDTVHLPFEGGSLLQIPVKALKYSPDKPVSVKISFEDEPRKKYVDAETSL

SEQ ID NO: 18936 - protein, 1231 aa, Artificial Sequence
  Synthetic polypeptide
KCKTEGPDEEAVVDLGKTSSTVNTKFEKEELESHRAVYIGVHVPFSKESRRRHRHRGHKHHHRRRKDKESDKEDGRESPSYDTPSQRVQFILGTEDDDEEHIPHDLFTEMDELCYRDGEEYEWKETARWLKFEEDVEDGGDRWSKPYVATLSLHSLFELRSCILNGTVMLDMRASTLDEIADMVLDNMIASGQLDESIRENVREALLKRHHHQNEKRFTSRIPLVRSFADIGEGLSASRHSLRTGLSASNLSLRGESPLSLLLGHLLPSSRAGTPAGSRCTTPVPTPQNSPPSSPSISRLTSRSSQESQRQAPELLVSPASDDIPTVVIHPPEEDLEAALKGEEQKNEENVDLTPGILASPQSAPGNLDNSKSGEIKGNGSGGSRENSTVDFSKVDMNFMRKIPTGAEASNVLVGEVDFLERPIIAFVRLAPAVLLTGLTEVPVPTRFLFLLLGPAGKAPQYHEIGRSIATLMTDEIFHDVAYKAKDRNDLLSGIDEFLDQVTVLPPGEWDPSIRIEPPKSVPSQEKRKIPVFHNGSTPTLGETPKEAAHHAGPELQRTGRLFGGLILDIKRKAPFFLSDFKDALSLQCLASILFLYCACMSPVITFGGLLGEATEGRISAIESLFGASLTGIAYSLFAGQPLTILGSTGPVLVFEKILYKFCRDYQLSYLSLRTSIGLWTSFLCIVLVATDASSLVCYITRFTEEAFAALICIIFIYEALEKLFDLGETYAFNMHNNLDKLTSYSCVCTEPPNPSNETLAQWKKDNITAHNISWRNLTVSECKKLRGVFLGSACGHHGPYIPDVLFWCVILFFTTFFLSSFLKQFKTKRYFPTKVRSTISDFAVFLTIVIMVTIDYLVGVPSPKLHVPEKFEPTHPERGWIISPLGDNPWWTLLIAAIPALLCTILIFMDQQITAVIINRKEHKLKKGAGYHLDLLMVGVMLGVCSVMGLPWFVAATVLSISHVNSLKVESECSAPGEQPKFLGIREQRVTGLMIFILMGLSVFMTSVLKFIPMPVLYGVFLYMGVSSLKGIQLFDRIKLFGMPAKHQPDLIYLRYVPLWKVHIFTVIQLTCLVLLWVIKVSAAAVVFPMMVLALVFVRKLMDLCFTKRELSWLDDLMPESKKKKEDDKKKKEKEEAERMLQDDDDTVHLPFEGGSLLQIPVKALKYSVDPSIVNISDEMAKTAQWKALSMNTENAKVTRSNMSPDKPVSVKISFEDEPRKKYVDAETSL

SEQ ID NO: 18937 - protein, 563 aa, Artificial Sequence
  Synthetic polypeptide
KCKTEGPDEEAVVDLGKTSSTVNTKFEKEELESHRAVYIGVHVPFSKESRRRHRHRGHKHHHRRRKDKESDKEDGRESPSYDTPSQRVQFILGTEDDDEEHIPHDLFTEMDELCYRDGEEYEWKETARWLKFEEDVEDGGDRWSKPYVATLSLHSLFELRSCILNGTVMLDMRASTLDEIADMVLDNMIASGQLDESIRENVREALLKRHHHQNEKRFTSRIPLVRSFADIGEGLSASRHSLRTGLSASNLSLRGESPLSLLLGHLLPSSRAGTPAGSRCTTPVPTPQNSPPSSPSISRLTSRSSQESQRQAPELLVSPASDDIPTVVIHPPEEDLEAALKGEEQKNEENVDLTPGILASPQSAPGNLDNSKSGEIKGNGSGGSRENSTVDFSKVDMNFMRKIPTGAEASNVLVGEVDFLERPIIAFVRLAPAVLLTGLTEVPVPTRFLFLLLGPAGKAPQYHEIGRSIATLMTDEIFHDVAYKAKDRNDLLSGIDEFLDQVTVLPPGEWDPSIRIEPPKSVPSQEKRKIPVFHNGSTPTLGETPKEAAHHAGPELQRTGRVQ

SEQ ID NO: 18938 - protein, 1208 aa, Artificial Sequence
  Synthetic polypeptide
KCKTEGPDEEAVVDLGKTSSTVNTKFEKEELESHRAVYIGVHVPFSKESRRRHRHRGHKHHHRRRKDKESDKEDGRESPSYDTPSQRVQFILGTEDDDEEHIPHDLFTEMDELCYRDGEEYEWKETARWLKFEEDVEDGGDRWSKPYVATLSLHSLFELRSCILNGTVMLDMRASTLDEIADMVLDNMIASGQLDESIRENVREALLKRHHHQNEKRFTSRIPLVRSFADIGKKHSDPHLLERNGEGLSASRHSLRTGLSASNLSLRGESPLSLLLGHLLPSSRAGTPAGSRCTTPVPTPQNSPPSSPSISRLTSRSSQESQRQAPELLVSPASDDIPTVVIHPPEEDLEAALKGEEQKNEENVDLTPGILASPQSAPGNLDNSKSGEIKGNGSGGSRENSTVDFSKVDMNFMRKIPTGAEASNVLVGEVDFLERPIIAFVRLAPAVLLTGLTEVPVPTRFLFLLLGPAGKAPQYHEIGRSIATLMTDEIFHDVAYKAKDRNDLLSGIDEFLDQVTVLPPGEWDPSIRIEPPKSVPSQEKRKIPVFHNGSTPTLGETPKEAAHHAGPELQRTGRLFGGLILDIKRKAPFFLSDFKDALSLQCLASILFLYCACMSPVITFGGLLGEATEGRISAIESLFGASLTGIAYSLFAGQPLTILGSTGPVLVFEKILYKFCRDYQLSYLSLRTSIGLWTSFLCIVLVATDASSLVCYITRFTEEAFAALICIIFIYEALEKLFDLGETYAFNMHNNLDKLTSYSCVCTEPPNPSNETLAQWKKDNITAHNISWRNLTVSECKKLRGVFLGSACGHHGPYIPDVLFWCVILFFTTFFLSSFLKQFKTKRYFPTKVRSTISDFAVFLTIVIMVTIDYLVGVPSPKLHVPEKFEPTHPERGWIISPLGDNPWWTLLIAAIPALLCTILIFMDQQITAVIINRKEHKLKKGAGYHLDLLMVGVMLGVCSVMGLPWFVAATVLSISHVNSLKVESECSAPGEQPKFLGIREQRVTGLMIFILMGLSVFMTSVLKFIPMPVLYGVFLYMGVSSLKGIQLFDRIKLFGMPAKHQPDLIYLRYVPLWKVHIFTVIQLTCLVLLWVIKVSAAAVVFPMMVLALVFVRKLMDLCFTKRELSWLDDLMPESKKKKEDDKKKKEKEEAERMLQDDDDTVHLPFEGGSLLQIPVKALKYSPDKPVSVKISFEDEPRKKYVDAETSL

SEQ ID NO: 18939 - protein, 1244 aa, Artificial Sequence
  Synthetic polypeptide
KCKTEGPDEEAVVDLGKTSSTVNTKFEKEELESHRAVYIGVHVPFSKESRRRHRHRGHKHHHRRRKDKESDKEDGRESPSYDTPSQRVQFILGTEDDDEEHIPHDLFTEMDELCYRDGEEYEWKETARWLKFEEDVEDGGDRWSKPYVATLSLHSLFELRSCILNGTVMLDMRASTLDEIADMVLDNMIASGQLDESIRENVREALLKRHHHQNEKRFTSRIPLVRSFADIGKKHSDPHLLERNGEGLSASRHSLRTGLSASNLSLRGESPLSLLLGHLLPSSRAGTPAGSRCTTPVPTPQNSPPSSPSISRLTSRSSQESQRQAPELLVSPASDDIPTVVIHPPEEDLEAALKGEEQKNEENVDLTPGILASPQSAPGNLDNSKSGEIKGNGSGGSRENSTVDFSKVDMNFMRKIPTGAEASNVLVGEVDFLERPIIAFVRLAPAVLLTGLTEVPVPTRFLFLLLGPAGKAPQYHEIGRSIATLMTDEIFHDVAYKAKDRNDLLSGIDEFLDQVTVLPPGEWDPSIRIEPPKSVPSQEKRKIPVFHNGSTPTLGETPKEAAHHAGPELQRTGRLFGGLILDIKRKAPFFLSDFKDALSLQCLASILFLYCACMSPVITFGGLLGEATEGRISAIESLFGASLTGIAYSLFAGQPLTILGSTGPVLVFEKILYKFCRDYQLSYLSLRTSIGLWTSFLCIVLVATDASSLVCYITRFTEEAFAALICIIFIYEALEKLFDLGETYAFNMHNNLDKLTSYSCVCTEPPNPSNETLAQWKKDNITAHNISWRNLTVSECKKLRGVFLGSACGHHGPYIPDVLFWCVILFFTTFFLSSFLKQFKTKRYFPTKVRSTISDFAVFLTIVIMVTIDYLVGVPSPKLHVPEKFEPTHPERGWIISPLGDNPWWTLLIAAIPALLCTILIFMDQQITAVIINRKEHKLKKGAGYHLDLLMVGVMLGVCSVMGLPWFVAATVLSISHVNSLKVESECSAPGEQPKFLGIREQRVTGLMIFILMGLSVFMTSVLKFIPMPVLYGVFLYMGVSSLKGIQLFDRIKLFGMPAKHQPDLIYLRYVPLWKVHIFTVIQLTCLVLLWVIKVSAAAVVFPMMVLALVFVRKLMDLCFTKRELSWLDDLMPESKKKKEDDKKKKEKEEAERMLQDDDDTVHLPFEGGSLLQIPVKALKYSVDPSIVNISDEMAKTAQWKALSMNTENAKVTRSNMSPDKPVSVKISFEDEPRKKYVDAETSL

SEQ ID NO: 18940 - protein, 1045 aa, Artificial Sequence
  Synthetic polypeptide
KCKTEGPDEEAVVDLGKTSSTVNTKFEKEELESHRAVYIGVHVPFSKESRRRHRHRGHKHHHRRRKDKESDKEDGRESPSYDTPSQRVQFILGTEDDDEEHIPHDLFTEMDELCYRDGEEYEWKETARWLKFEEDVEDGGDRWSKPYVATLSLHSLFELRSCILNGTVMLDMRASTLDEIADMVLDNMIASGQLDESIRENVREALLKRHHHQNEKRFTSRIPLVRSFADIGKKHSDPHLLERNGILASPQSAPGNLDNSKSGEIKGNGSGGSRENSTVDFSKESASWHCSCGTLGVGLKRPAVDMNFMRKIPTGAEASNVLVGEVDFLERPIIAFVRLAPAVLLTGLTEVPVPTRFLFLLLGPAGKAPQYHEIGRSIATLMTDEIFHDVAYKAKDRNDLLSGIDEFLDQVTVLPPGEWDPSIRIEPPKSVPSQEKRKIPVFHNGSTPTLGETPKEAAHHAGPELQRTGRLFGGLILDIKRKAPFFLSDFKDALSLQCLASILFLYCACMSPVITFGGLLGEATEGRISAIESLFGASLTGIAYSLFAGQPLTILGSTGPVLVFEKILYKFCRDYQLSYLSLRTSIGLWTSFLCIVLVATDASSLVCYITRFTEEAFAALICIIFIYEALEKLFDLGETYAFNMHNNLDKLTSYSCVCTEPPNPSNETLAQWKKDNITAHNISWRNLTVSECKKLRGVFLGSACGHHGPYIPDVLFWCVILFFTTFFLSSFLKQFKTKRYFPTKVRSTISDFAVFLTIVIMVTIDYLVGVPSPKLHVPEKFEPTHPERGWIISPLGDNPWWTLLIAAIPALLCTILIFMDQQITAVIINRKEHKLKKGAGYHLDLLMVGVMLGVCSVMGLPWFVAATVLSISHVNSLKVESECSAPGEQPKFLGIREQRVTGLMIFILMGLSVFMTSVLKFIPMPVLYGVFLYMGVSSLKGIQLFDRIKLFGMPAKHQPDLIYLRYVPLWKVHIFTVIQLTCLVLLWVIKVSAAAVVFPMMVLALVFVRKLMDLCFTKRELSWLDDLMPESKKKKEDDKKKKEKE

SEQ ID NO: 18941 - protein, 1084 aa, Artificial Sequence
  Synthetic polypeptide
KCKTEGPDEEAVVDLGKTSSTVNTKFEKEELESHRAVYIGVHVPFSKESRRRHRHRGHKHHHRRRKDKESDKEDGRESPSYDTPSQRVQFILGTEDDDEEHIPHDLFTEMDELCYRDGEEYEWKETARWLKFEEDVEDGGDRWSKPYVATLSLHSLFELRSCILNGTVMLDMRASTLDEIADMVLDNMIASGQLDESIRENVREALLKRHHHQNEKRFTSRIPLVRSFADIGKKHSDPHLLERNGILASPQSAPGNLDNSKSGEIKGNGSGGSRENSTVDFSKVDMNFMRKIPTGAEASNVLVGEVDFLERPIIAFVRLAPAVLLTGLTEVPVPTRFLFLLLGPAGKAPQYHEIGRSIATLMTDEIFHDVAYKAKDRNDLLSGIDEFLDQVTVLPPGEWDPSIRIEPPKSVPSQEKRKIPVFHNGSTPTLGETPKEAAHHAGPELQRTGRLFGGLILDIKRKAPFFLSDFKDALSLQCLASILFLYCACMSPVITFGGLLGEATEGRISAIESLFGASLTGIAYSLFAGQPLTILGSTGPVLVFEKILYKFCRDYQLSYLSLRTSIGLWTSFLCIVLVATDASSLVCYITRFTEEAFAALICIIFIYEALEKLFDLGETYAFNMHNNLDKLTSYSCVCTEPPNPSNETLAQWKKDNITAHNISWRNLTVSECKKLRGVFLGSACGHHGPYIPDVLFWCVILFFTTFFLSSFLKQFKTKRYFPTKVRSTISDFAVFLTIVIMVTIDYLVGVPSPKLHVPEKFEPTHPERGWIISPLGDNPWWTLLIAAIPALLCTILIFMDQQITAVIINRKEHKLKKGAGYHLDLLMVGVMLGVCSVMGLPWFVAATVLSISHVNSLKVESECSAPGEQPKFLGIREQRVTGLMIFILMGLSVFMTSVLKFIPMPVLYGVFLYMGVSSLKGIQLFDRIKLFGMPAKHQPDLIYLRYVPLWKVHIFTVIQLTCLVLLWVIKVSAAAVVFPMMVLALVFVRKLMDLCFTKRELSWLDDLMPESKKKKEDDKKKKEKEEAERMLQDDDDTVHLPFEGGSLLQIPVKALKYSPDKPVSVKISFEDEPRKKYVDAETSL

SEQ ID NO: 18942 - protein, 1120 aa, Artificial Sequence
  Synthetic polypeptide
KCKTEGPDEEAVVDLGKTSSTVNTKFEKEELESHRAVYIGVHVPFSKESRRRHRHRGHKHHHRRRKDKESDKEDGRESPSYDTPSQRVQFILGTEDDDEEHIPHDLFTEMDELCYRDGEEYEWKETARWLKFEEDVEDGGDRWSKPYVATLSLHSLFELRSCILNGTVMLDMRASTLDEIADMVLDNMIASGQLDESIRENVREALLKRHHHQNEKRFTSRIPLVRSFADIGKKHSDPHLLERNGILASPQSAPGNLDNSKSGEIKGNGSGGSRENSTVDFSKVDMNFMRKIPTGAEASNVLVGEVDFLERPIIAFVRLAPAVLLTGLTEVPVPTRFLFLLLGPAGKAPQYHEIGRSIATLMTDEIFHDVAYKAKDRNDLLSGIDEFLDQVTVLPPGEWDPSIRIEPPKSVPSQEKRKIPVFHNGSTPTLGETPKEAAHHAGPELQRTGRLFGGLILDIKRKAPFFLSDFKDALSLQCLASILFLYCACMSPVITFGGLLGEATEGRISAIESLFGASLTGIAYSLFAGQPLTILGSTGPVLVFEKILYKFCRDYQLSYLSLRTSIGLWTSFLCIVLVATDASSLVCYITRFTEEAFAALICIIFIYEALEKLFDLGETYAFNMHNNLDKLTSYSCVCTEPPNPSNETLAQWKKDNITAHNISWRNLTVSECKKLRGVFLGSACGHHGPYIPDVLFWCVILFFTTFFLSSFLKQFKTKRYFPTKVRSTISDFAVFLTIVIMVTIDYLVGVPSPKLHVPEKFEPTHPERGWIISPLGDNPWWTLLIAAIPALLCTILIFMDQQITAVIINRKEHKLKKGAGYHLDLLMVGVMLGVCSVMGLPWFVAATVLSISHVNSLKVESECSAPGEQPKFLGIREQRVTGLMIFILMGLSVFMTSVLKFIPMPVLYGVFLYMGVSSLKGIQLFDRIKLFGMPAKHQPDLIYLRYVPLWKVHIFTVIQLTCLVLLWVIKVSAAAVVFPMMVLALVFVRKLMDLCFTKRELSWLDDLMPESKKKKEDDKKKKEKEEAERMLQDDDDTVHLPFEGGSLLQIPVKALKYSVDPSIVNISDEMAKTAQWKALSMNTENAKVTRSNMSPDKPVSVKISFEDEPRKKYVDAETSL

SEQ ID NO: 18943 - protein, 452 aa, Artificial Sequence
  Synthetic polypeptide
KCKTEGPDEEAVVDLGKTSSTVNTKFEKEELESHRAVYIGVHVPFSKESRRRHRHRGHKHHHRRRKDKESDKEDGRESPSYDTPSQRVQFILGTEDDDEEHIPHDLFTEMDELCYRDGEEYEWKETARWLKFEEDVEDGGDRWSKPYVATLSLHSLFELRSCILNGTVMLDMRASTLDEIADMVLDNMIASGQLDESIRENVREALLKRHHHQNEKRFTSRIPLVRSFADIGKKHSDPHLLERNGILASPQSAPGNLDNSKSGEIKGNGSGGSRENSTVDFSKVDMNFMRKIPTGAEASNVLVGEVDFLERPIIAFVRLAPAVLLTGLTEVPVPTRFLFLLLGPAGKAPQYHEIGRSIATLMTDEIFHDVAYKAKDRNDLLSGIDEFLDQVTVLPPGEWDPSIRIEPPKSVPSQEKRKIPVFHNGSTPTLGETPKEAAHHAGPELQRTGRVQ

SEQ ID NO: 18944 - protein, 4 aa, Artificial Sequence
  Synthetic polypeptide
NRGS

SEQ ID NO: 18945 - protein, 538 aa, Artificial Sequence
  Synthetic polypeptide
GQVNNDMIVTDNNGAVKFPQLCKFCDVRFSTCDNQKSCMSNCSITSICEKPQEVCVAVWRKNDENITLETVCHDPKLPYHDFILEDAASPKCIMKEKKKPGETFFMCSCSSDECNDNIIFSEEYNTSNPDLLLVIFQVTGISLLPPLGVAISVIIIFYCYRVNRQQKLSSTWETGKTRKLMEFSEHCAIILEDDRSDISSTCANNINHNTELLPIELDTLVGKGRFAEVYKAKLKQNTSEQFETVAVKIFPYEEYASWKTEKDIFSDINLKHENILQFLTAEERKTELGKQYWLITAFHAKGNLQEYLTRHVISWEDLRKLGSSLARGIAHLHSDHTPCGRPKMPIVHRDLKSSNILVKNDLTCCLCDFGLSLRLDPTLSVDDLANSGQVGTARYMAPEVLESRMNLENVESFKQTDVYSMALVLWEMTSRCNAVGEVKDYEPPFGSKVREHPCVESMKDNVLRDRGRPEIPSFWLNHQGIQMVCETLTECWDHDPEARLTAQCVAERFSELEHLDRLSGRSCSEEKIPEDGSLNTTK

SEQ ID NO: 18946 - protein, 21 aa, Artificial Sequence
  Synthetic polypeptide
GWALWLMPVIPALCEAKLITT

SEQ ID NO: 18947 - protein, 8 aa, Artificial Sequence
  Synthetic polypeptide
SQHFVRPS

SEQ ID NO: 18948 - protein, 15 aa, Artificial Sequence
  Synthetic polypeptide
GMAWAIRHGERMTRT

SEQ ID NO: 18949 - protein, 40 aa, Artificial Sequence
  Synthetic polypeptide
RFQRKDLDKECVQRRGTSVVRGLEIMLSEEWPGQLDMEKE

SEQ ID NO: 18950 - protein, 481 aa, Artificial Sequence
  Synthetic polypeptide
TWRKNDENITLETVCHDPKLPYHDFILEDAASPKCIMKEKKKPGETFFMCSCSSDECNDNIIFSEEYNTSNPDLLLVIFQVTGISLLPPLGVAISVIIIFYCYRVNRQQKLSSTWETGKTRKLMEFSEHCAIILEDDRSDISSTCANNINHNTELLPIELDTLVGKGRFAEVYKAKLKQNTSEQFETVAVKIFPYEEYASWKTEKDIFSDINLKHENILQFLTAEERKTELGKQYWLITAFHAKGNLQEYLTRHVISWEDLRKLGSSLARGIAHLHSDHTPCGRPKMPIVHRDLKSSNILVKNDLTCCLCDFGLSLRLDPTLSVDDLANSGQVGTARYMAPEVLESRMNLENVESFKQTDVYSMALVLWEMTSRCNAVGEVKDYEPPFGSKVREHPCVESMKDNVLRDRGRPEIPSFWLNHQGIQMVCETLTECWDHDPEARLTAQCVAERFSELEHLDRLSGRSCSEEKIPEDGSLNTTK

SEQ ID NO: 18951 - protein, 455 aa, Artificial Sequence
  Synthetic polypeptide
NLTGRCKIRHIGSNNRLQRSTCQNTGWESAHVMKTPGFREYNTSNPDLLLVIFQVTGISLLPPLGVAISVIIIFYCYRVNRQQKLSSTWETGKTRKLMEFSEHCAIILEDDRSDISSTCANNINHNTELLPIELDTLVGKGRFAEVYKAKLKQNTSEQFETVAVKIFPYEEYASWKTEKDIFSDINLKHENILQFLTAEERKTELGKQYWLITAFHAKGNLQEYLTRHVISWEDLRKLGSSLARGIAHLHSDHTPCGRPKMPIVHRDLKSSNILVKNDLTCCLCDFGLSLRLDPTLSVDDLANSGQVGTARYMAPEVLESRMNLENVESFKQTDVYSMALVLWEMTSRCNAVGEVKDYEPPFGSKVREHPCVESMKDNVLRDRGRPEIPSFWLNHQGIQMVCETLTECWDHDPEARLTAQCVAERFSELEHLDRLSGRSCSEEKIPEDGSLNTTK

SEQ ID NO: 18952 - protein, 2 aa, Artificial Sequence
  Synthetic polypeptide
RI

SEQ ID NO: 18953 - protein, 16 aa, Artificial Sequence
  Synthetic polypeptide
RPQGLENITPAILTCC

SEQ ID NO: 18954 - protein, 16 aa, Artificial Sequence
  Synthetic polypeptide
NSENESINFTRLPGGI

SEQ ID NO: 18955 - protein, 58 aa, Artificial Sequence
  Synthetic polypeptide
NSENESINFTRLPGGIDEGPEGLKLISDIIREKMGIDISVLMGANIANEVAAEKFCET

SEQ ID NO: 18956 - protein, 75 aa, Artificial Sequence
  Synthetic polypeptide
NSENESINFTRLPGGIDEGPEGLKLISDIIREKMGIDISVLMGANIANEVAAEKFCETTIGSKVMENGLLFKELL

SEQ ID NO: 18957 - protein, 112 aa, Artificial Sequence
  Synthetic polypeptide
NSENESINFTRLPGGIDEGPEGLKLISDIIREKMGIDISVLMGANIANEVAAEKFCETTIGSKVMENGLLFKELLQTPNFRITVVDDADTVELCGALKNIVAVGAGFCDGLR

SEQ ID NO: 18958 - protein, 243 aa, Artificial Sequence
  Synthetic polypeptide
NSENESINFTRLPGGIDEGPEGLKLISDIIREKMGIDISVLMGANIANEVAAEKFCETTIGSKVMENGLLFKELLQTPNFRITVVDDADTVELCGALKNIVAVGAGFCDGLRCGDNTKAAVIRLGLMEMIAFARIFCKGQVSTATFLESCGVADLITTCYGGRNRRVAEAFARTGKTIEELEKEMLNGQKLQGPQTSAEVYRILKQKGLLDKFPLFTAVYQICYESRPVQEMLSCLQSHPEHT

SEQ ID NO: 18959 - protein, 8 aa, Artificial Sequence
  Synthetic polypeptide
TSPDYQGA

SEQ ID NO: 18960 - protein, 11 aa, Artificial Sequence
  Synthetic polypeptide
VHKLHQTTRGH

SEQ ID NO: 18961 - protein, 22 aa, Artificial Sequence
  Synthetic polypeptide
VHKLHQTTRGHRRGPRGAEAHF

SEQ ID NO: 18962 - protein, 150 aa, Artificial Sequence; identical to SEQ ID NO: 3121
  Synthetic polypeptide

SEQ ID NO: 18963 - protein, 53 aa, Artificial Sequence; identical to SEQ ID NO: 5046
  Synthetic polypeptide

SEQ ID NO: 18964 - protein, 28 aa, Artificial Sequence
  Synthetic polypeptide
SLLFALISYISFPVGCPPQVAVSAGLHL

SEQ ID NO: 18965 - protein, 877 aa, Artificial Sequence
  Synthetic polypeptide
DQLGRHSRVRAKLSAPLAGMGNAKADSRGRSRTKMVSQSQPGSRSGSPGRVLTTTALSTVSSGVQRVLVNSASAQKRSKIPRSQGCSREASPSRLSVARSSRIPRPSVSQGCSREASRESSRDTSPVRSFQPLASRHHSRSTGALYAPEVYGASGPGYGISQSSRLSSSVSAMRVLNTGSDVEEAVADALKKPARRRYESYGMHSDDDANSDASSACSERSYSSRNGSIPTYMRQTEDVAEVLNRCASSNWSERKEGLLGLQNLLKNQRTLSRVELKRLCEIFTRMFADPHGKVFSMFLETLVDFIQVHKDDLQDWLFVLLTQLLKKMGADLLGSVQAKVQKALDVTRESFPNDLQFNILMRFTVDQTQTPSLKVKVAILKYIETLAKQMDPGDFINSSETRLAVSRVITWTTEPKSSDVRKAAQSVLISLFELNTPEFTMLLGALPKTFQDGATKLLHNHLRNTGNGTQSSMGSPLTRPTPRSPANWSSPLTSPTNTSQNTLSPSAFDYDTENMNSEDIYSSLRGVTEAIQNFSFRSQEDMNEPLKRDSKKDDGDSMCGGPGMSDPRAGGDATDSSQTALDNKASLLHSMPTHSSPRSRDYNPYNYSDSISPFNKSALKEAMFDDDADQFPDDLSLDHSDLVAELLKELSNHNERVEERKIALYELMKLTQEESFSVWDEHFKTILLLLLETLGDKEPTIRALALKVLREILRHQPARFKNYAELTVMKTLEAHKDPHKEVVRSAEEAASVLATSISPEQCIKVLCPIIQTADYPINLAAIKMQTKVIERVSKETLNLLLPEIMPGLIQGYDNSESSVRKACVFCLVAVHAVIGDELKPHLSQLTGSKMKLLNLYIKRAQTGSGGADPTTDVSGQS

SEQ ID NO: 18966 - protein, 857 aa, Artificial Sequence
  Synthetic polypeptide
DQLGRHSRVRAKLSAPLAGMGNAKADSRGRSRTKMVSQSQPGSRSGSPGRVLTTTALSTVSSGVQRVLVNSASAQKRSKIPRSQGCSREASPSRLSVARSSRIPRPSVSQGCSREASRESSRDTSPVRSFQPLGPGYGISQSSRLSSSVSAMRVLNTGSDVEEAVADALKKPARRRYESYGMHSDDDANSDASSACSERSYSSRNGSIPTYMRQTEDVAEVLNRCASSNWSERKEGLLGLQNLLKNQRTLSRVELKRLCEIFTRMFADPHGKRVFSMFLETLVDFIQVHKDDLQDWLFVLLTQLLKKMGADLLGSVQAKVQKALDVTRESFPNDLQFNILMRFTVDQTQTPSLKVKVAILKYIETLAKQMDPGDFINSSETRLAVSRVITWTTEPKSSDVRKAAQSVLISLFELNTPEFTMLLGALPKTFQDGATKLLHNHLRNTGNGTQSSMGSPLTRPTPRSPANWSSPLTSPTNTSQNTLSPSAFDYDTENMNSEDIYSSLRGVTEAIQNFSFRSQEDMNEPLKRDSKKDDGDSMCGGPGMSDPRAGGDATDSSQTALDNKASLLHSMPTHSSPRSRDYNPYNYSDSISPFNKSALKEAMFDDDADQFPDDLSLDHSDLVAELLKELSNHNERVEERKIALYELMKLTQEESFSVWDEHFKTILLLLLETLGDKEPTIRALALKVLREILRHQPARFKNYAELTVMKTLEAHKDPHKEVVRSAEEAASVLATSISPEQCIKVLCPIIQTADYPINLAAIKMQTKVIERVSKETLNLLLPEIMPGLIQGYDNSESSVRKACVFCLVAVHAVIGDELKPHLSQLTGSKMKLLNLYIKRAQTGSGGADPTTDVSGQS

SEQ ID NO: 18967 - protein, 856 aa, Artificial Sequence
  Synthetic polypeptide
DQLGRHSRVRAKLSAPLAGMGNAKADSRGRSRTKMVSQSQPGSRSGSPGRVLTTTALSTVSSGVQRVLVNSASAQKRSKIPRSQGCSREASPSRLSVARSSRIPRPSVSQGCSREASRESSRDTSPVRSFQPLGPGYGISQSSRLSSSVSAMRVLNTGSDVEEAVADALKKPARRRYESYGMHSDDDANSDASSACSERSYSSRNGSIPTYMRQTEDVAEVLNRCASSNWSERKEGLLGLQNLLKNQRTLSRVELKRLCEIFTRMFADPHGKVFSMFLETLVDFIQVHKDDLQDWLFVLLTQLLKKMGADLLGSVQAKVQKALDVTRESFPNDLQFNILMRFTVDQTQTPSLKVKVAILKYIETLAKQMDPGDFINSSETRLAVSRVITWTTEPKSSDVRKAAQSVLISLFELNTPEFTMLLGALPKTFQDGATKLLHNHLRNTGNGTQSSMGSPLTRPTPRSPANWSSPLTSPTNTSQNTLSPSAFDYDTENMNSEDIYSSLRGVTEAIQNFSFRSQEDMNEPLKRDSKKDDGDSMCGGPGMSDPRAGGDATDSSQTALDNKASLLHSMPTHSSPRSRDYNPYNYSDSISPFNKSALKEAMFDDDADQFPDDLSLDHSDLVAELLKELSNHNERVEERKIALYELMKLTQEESFSVWDEHFKTILLLLLETLGDKEPTIRALALKVLREILRHQPARFKNYAELTVMKTLEAHKDPHKEVVRSAEEAASVLATSISPEQCIKVLCPIIQTADYPINLAAIKMQTKVIERVSKETLNLLLPEIMPGLIQGYDNSESSVRKACVFCLVAVHAVIGDELKPHLSQLTGSKMKLLNLYIKRAQTGSGGADPTTDVSGQS

SEQ ID NO: 18968 - protein, 864 aa, Artificial Sequence
  Synthetic polypeptide
DQLGRHSRVRAKLSAPLAGMGNAKADSRGRSRTKMVSQSQPGSRSGSPGRVLTTTALSTVSSGVQRVLVNSASAQKRSKIPRSQGCSREASPSRLSVARSSRIPRPSVSQGCSREASRESSRDTSPVRSFQPLGPGYGISQSSRLSSSVSAMRVLNTGSDVEEAVADALLLGDIRTKKKPARRRYESYGMHSDDDANSDASSACSERSYSSRNGSIPTYMRQTEDVAEVLNRCASSNWSERKEGLLGLQNLLKNQRTLSRVELKRLCEIFTRMFADPHGKVFSMFLETLVDFIQVHKDDLQDWLFVLLTQLLKKMGADLLGSVQAKVQKALDVTRESFPNDLQFNILMRFTVDQTQTPSLKVKVAILKYIETLAKQMDPGDFINSSETRLAVSRVITWTTEPKSSDVRKAAQSVLISLFELNTPEFTMLLGALPKTFQDGATKLLHNHLRNTGNGTQSSMGSPLTRPTPRSPANWSSPLTSPTNTSQNTLSPSAFDYDTENMNSEDIYSSLRGVTEAIQNFSFRSQEDMNEPLKRDSKKDDGDSMCGGPGMSDPRAGGDATDSSQTALDNKASLLHSMPTHSSPRSRDYNPYNYSDSISPFNKSALKEAMFDDDADQFPDDLSLDHSDLVAELLKELSNHNERVEERKIALYELMKLTQEESFSVWDEHFKTILLLLLETLGDKEPTIRALALKVLREILRHQPARFKNYAELTVMKTLEAHKDPHKEVVRSAEEAASVLATSISPEQCIKVLCPIIQTADYPINLAAIKMQTKVIERVSKETLNLLLPEIMPGLIQGYDNSESSVRKACVFCLVAVHAVIGDELKPHLSQLTGSKMKLLNLYIKRAQTGSGGADPTTDVSGQS

SEQ ID NO: 18969 - protein, 662 aa, Artificial Sequence
  Synthetic polypeptide
DQLGRHSRVRAKLSAPLAGMGNAKADSRGRSRTKMVSQSQRSSSPDKNEGSQSANTIGAGSRSGSPGRVLTTTALSTVSSGVQRVLVNSASAQKRSKIPRSQGCSREASPSRLSVARSSRIPRPSVSQGCSREASRESSRDTSPVRSFQPLGPGYGISQSSRLSSSVSAMRVLNTGSDVEEAVADALVLFDFKTKKKPARRRYESYGMHSDDDANSDASSACSERSYSSRNGSIPTYMRQTEDVAEVLNRCASSNWSERKEGLLGLQNLLKNQRTLSRVELKRLCEIFTRMFADPHGKVFSMFLETLVDFIQVHKDDLQDWLFVLLTQLLKKMGADLLGSVQAKVQKALDVTRESFPNDLQFNILMRFTVDQTQTPSLKVKVAILKYIETLAKQMDPGDFINSSETRLAVSRVITWTTEPKSSDVRKAAQSVLISLFELNTPEFTMLLGALPKTFQDGATKLLHNHLRNTGNGTQSSMGSPLTRPTPRSPANWSSPLTSPTNTSQNTLSPSAFDYDTENMNSEDIYSSLRGVTEAIQNFSFRSQEDMNEPLKRDSKKDDGDSMCGGPGMSDPRAGGDATDSSQTALDNKASLLHSMPTHSSPRSRDYNPYNYSDSISPFNKSALKEAMFDDDADQFPDDLSLDHSDLVAELLKELSNHNERV

SEQ ID NO: 18970 - protein, 13 aa, Artificial Sequence
  Synthetic polypeptide
IQKFETSLDDIAG

SEQ ID NO: 18971 - protein, 41 aa, Artificial Sequence
  Synthetic polypeptide
EAESPFFFQMVYSKSINCGWKSISRQQQSQFPSRKPAAFTK

SEQ ID NO: 18972 - protein, 101 aa, Artificial Sequence
  Synthetic polypeptide
FQHFERLSRPFSSKWSTANPSTVAGRVSAGSSKASSLPGSLQRSRSDIDVNAAAGAKAHHAAGQSVRSGRLGAGALNAGSYASLECEAFWRSGRTAKLYSV

SEQ ID NO: 18973 - protein, 754 aa, Artificial Sequence
  Synthetic polypeptide
FQHFERLSRPFSSKWSTANPSTVAGRVSAGSSKASSLPGSLQRSRSDIDVNAAAGAKAHHAAGQSVRSGRLGAGALNAGSYASLEDTSDKLDDLFSDNGRVRAKLSAPLAGMGNAKADSRGRSRTKMVSQSQRSSSPDKNEGSQSANTIGAGSRSGSPGRVLTTTALSTVSSGVQRVLVNSASAQKRSKIPRSQGCSREASPSRLSVARSSRIPRPSVSQGCSREASRESSRDTSPVRSFQPLGPGYGISQSSRLSSSVSAMRVLNTGSDVEEAVADALVLFDFKTKKKPARRRYESYGMHSDDDANSDASSACSERSYSSRNGSIPTYMRQTEDVAEVLNRCASSNWSERKEGLLGLQNLLKNQRTLSRVELKRLCEIFTRMFADPHGKVFSMFLETLVDFIQVHKDDLQDWLFVLLTQLLKKMGADLLGSVQAKVQKALDVTRESFPNDLQFNILMRFTVDQTQTPSLKVKVAILKYIETLAKQMDPGDFINSSETRLAVSRVITWTTEPKSSDVRKAAQSVLISLFELNTPEFTMLLGALPKTFQDGATKLLHNHLRNTGNGTQSSMGSPLTRPTPRSPANWSSPLTSPTNTSQNTLSPSAFDYDTENMNSEDIYSSLRGVTEAIQNFSFRSQEDMNEPLKRDSKKDDGDSMCGGPGMSDPRAGGDATDSSQTALDNKASLLHSMPTHSSPRSRDYNPYNYSDSISPFNKSALKEAMFDDDADQFPDDLSLDHSDLVAELLKELSNHNERV

SEQ ID NO: 18974 - protein, 969 aa, Artificial Sequence
  Synthetic polypeptide
FQHFERLSRPFSSKWSTANPSTVAGRVSAGSSKASSLPGSLQRSRSDIDVNAAAGAKAHHAAGQSVRSGRLGAGALNAGSYASLEDTSDKLDGTASEDGRVRAKLSAPLAGMGNAKADSRGRSRTKMVSQSQPGSRSGSPGRVLTTTALSTVSSGVQRVLVNSASAQKRSKIPRSQGCSREASPSRLSVARSSRIPRPSVSQGCSREASRESSRDTSPVRSFQPLASRHHSRSTGALYAPEVYGASGPGYGISQSSRLSSSVSAMRVLNTGSDVEEAVADALKKPARRRYESYGMHSDDDANSDASSACSERSYSSRNGSIPTYMRQTEDVAEVLNRCASSNWSERKEGLLGLQNLLKNQRTLSRVELKRLCEIFTRMFADPHGKVFSMFLETLVDFIQVHKDDLQDWLFVLLTQLLKKMGADLLGSVQAKVQKALDVTRESFPNDLQFNILMRFTVDQTQTPSLKVKVAILKYIETLAKQMDPGDFINSSETRLAVSRVITWTTEPKSSDVRKAAQSVLISLFELNTPEFTMLLGALPKTFQDGATKLLHNHLRNTGNGTQSSMGSPLTRPTPRSPANWSSPLTSPTNTSQNTLSPSAFDYDTENMNSEDIYSSLRGVTEAIQNFSFRSQEDMNEPLKRDSKKDDGDSMCGGPGMSDPRAGGDATDSSQTALDNKASLLHSMPTHSSPRSRDYNPYNYSDSISPFNKSALKEAMFDDDADQFPDDLSLDHSDLVAELLKELSNHNERVEERKIALYELMKLTQEESFSVWDEHFKTILLLLLETLGDKEPTIRALALKVLREILRHQPARFKNYAELTVMKTLEAHKDPHKEVVRSAEEAASVLATSISPEQCIKVLCPIIQTADYPINLAAIKMQTKVIERVSKETLNLLLPEIMPGLIQGYDNSESSVRKACVFCLVAVHAVIGDELKPHLSQLTGSKMKLLNLYIKRAQTGSGGADPTTDVSGQS

SEQ ID NO: 18975 - protein, 949 aa, Artificial Sequence
  Synthetic polypeptide
FQHFERLSRPFSSKWSTANPSTVAGRVSAGSSKASSLPGSLQRSRSDIDVNAAAGAKAHHAAGQSVRSGRLGAGALNAGSYASLEDTSDKLDGTASEDGRVRAKLSAPLAGMGNAKADSRGRSRTKMVSQSQPGSRSGSPGRVLTTTALSTVSSGVQRVLVNSASAQKRSKIPRSQGCSREASPSRLSVARSSRIPRPSVSQGCSREASRESSRDTSPVRSFQPLGPGYGISQSSRLSSSVSAMRVLNTGSDVEEAVADALKKPARRRYESYGMHSDDDANSDASSACSERSYSSRNGSIPTYMRQTEDVAEVLNRCASSNWSERKEGLLGLQNLLKNQRTLSRVELKRLCEIFTRMFADPHGKRVFSMFLETLVDFIQVHKDDLQDWLFVLLTQLLKKMGADLLGSVQAKVQKALDVTRESFPNDLQFNILMRFTVDQTQTPSLKVKVAILKYIETLAKQMDPGDFINSSETRLAVSRVITWTTEPKSSDVRKAAQSVLISLFELNTPEFTMLLGALPKTFQDGATKLLHNHLRNTGNGTQSSMGSPLTRPTPRSPANWSSPLTSPTNTSQNTLSPSAFDYDTENMNSEDIYSSLRGVTEAIQNFSFRSQEDMNEPLKRDSKKDDGDSMCGGPGMSDPRAGGDATDSSQTALDNKASLLHSMPTHSSPRSRDYNPYNYSDSISPFNKSALKEAMFDDDADQFPDDLSLDHSDLVAELLKELSNHNERVEERKIALYELMKLTQEESFSVWDEHFKTILLLLLETLGDKEPTIRALALKVLREILRHQPARFKNYAELTVMKTLEAHKDPHKEVVRSAEEAASVLATSISPEQCIKVLCPIIQTADYPINLAAIKMQTKVIERVSKETLNLLLPEIMPGLIQGYDNSESSVRKACVFCLVAVHAVIGDELKPHLSQLTGSKMKLLNLYIKRAQTGSGGADPTTDVSGQS

SEQ ID NO: 18976 - protein, 948 aa, Artificial Sequence
  Synthetic polypeptide
FQHFERLSRPFSSKWSTANPSTVAGRVSAGSSKASSLPGSLQRSRSDIDVNAAAGAKAHHAAGQSVRSGRLGAGALNAGSYASLEDTSDKLDGTASEDGRVRAKLSAPLAGMGNAKADSRGRSRTKMVSQSQPGSRSGSPGRVLTTTALSTVSSGVQRVLVNSASAQKRSKIPRSQGCSREASPSRLSVARSSRIPRPSVSQGCSREASRESSRDTSPVRSFQPLGPGYGISQSSRLSSSVSAMRVLNTGSDVEEAVADALKKPARRRYESYGMHSDDDANSDASSACSERSYSSRNGSIPTYMRQTEDVAEVLNRCASSNWSERKEGLLGLQNLLKNQRTLSRVELKRLCEIFTRMFADPHGKVFSMFLETLVDFIQVHKDDLQDWLFVLLTQLLKKMGADLLGSVQAKVQKALDVTRESFPNDLQFNILMRFTVDQTQTPSLKVKVAILKYIETLAKQMDPGDFINSSETRLAVSRVITWTTEPKSSDVRKAAQSVLISLFELNTPEFTMLLGALPKTFQDGATKLLHNHLRNTGNGTQSSMGSPLTRPTPRSPANWSSPLTSPTNTSQNTLSPSAFDYDTENMNSEDIYSSLRGVTEAIQNFSFRSQEDMNEPLKRDSKKDDGDSMCGGPGMSDPRAGGDATDSSQTALDNKASLLHSMPTHSSPRSRDYNPYNYSDSISPFNKSALKEAMFDDDADQFPDDLSLDHSDLVAELLKELSNHNERVEERKIALYELMKLTQEESFSVWDEHFKTILLLLLETLGDKEPTIRALALKVLREILRHQPARFKNYAELTVMKTLEAHKDPHKEVVRSAEEAASVLATSISPEQCIKVLCPIIQTADYPINLAAIKMQTKVIERVSKETLNLLLPEIMPGLIQGYDNSESSVRKACVFCLVAVHAVIGDELKPHLSQLTGSKMKLLNLYIKRAQTGSGGADPTTDVSGQS

SEQ ID NO: 18977 - protein, 956 aa, Artificial Sequence
  Synthetic polypeptide
FQHFERLSRPFSSKWSTANPSTVAGRVSAGSSKASSLPGSLQRSRSDIDVNAAAGAKAHHAAGQSVRSGRLGAGALNAGSYASLEDTSDKLDGTASEDGRVRAKLSAPLAGMGNAKADSRGRSRTKMVSQSQPGSRSGSPGRVLTTTALSTVSSGVQRVLVNSASAQKRSKIPRSQGCSREASPSRLSVARSSRIPRPSVSQGCSREASRESSRDTSPVRSFQPLGPGYGISQSSRLSSSVSAMRVLNTGSDVEEAVADALLLGDIRTKKKPARRRYESYGMHSDDDANSDASSACSERSYSSRNGSIPTYMRQTEDVAEVLNRCASSNWSERKEGLLGLQNLLKNQRTLSRVELKRLCEIFTRMFADPHGKVFSMFLETLVDFIQVHKDDLQDWLFVLLTQLLKKMGADLLGSVQAKVQKALDVTRESFPNDLQFNILMRFTVDQTQTPSLKVKVAILKYIETLAKQMDPGDFINSSETRLAVSRVITWTTEPKSSDVRKAAQSVLISLFELNTPEFTMLLGALPKTFQDGATKLLHNHLRNTGNGTQSSMGSPLTRPTPRSPANWSSPLTSPTNTSQNTLSPSAFDYDTENMNSEDIYSSLRGVTEAIQNFSFRSQEDMNEPLKRDSKKDDGDSMCGGPGMSDPRAGGDATDSSQTALDNKASLLHSMPTHSSPRSRDYNPYNYSDSISPFNKSALKEAMFDDDADQFPDDLSLDHSDLVAELLKELSNHNERVEERKIALYELMKLTQEESFSVWDEHFKTILLLLLETLGDKEPTIRALALKVLREILRHQPARFKNYAELTVMKTLEAHKDPHKEVVRSAEEAASVLATSISPEQCIKVLCPIIQTADYPINLAAIKMQTKVIERVSKETLNLLLPEIMPGLIQGYDNSESSVRKACVFCLVAVHAVIGDELKPHLSQLTGSKMKLLNLYIKRAQTGSGGADPTTDVSGQS

SEQ ID NO: 18978 - protein, 124 aa, Artificial Sequence
  Synthetic polypeptide
FQHFERLSRPFSSKWSTANPSTVAGRVSAGSSKASSLPGSLQRSRSDIDVNAAAGAKAHHAAGQSVRSGRLGAGALNAGSYASLGKRTDYGKLYHVLSLISVKTSSYTLIISIHSCYLRIVHMF

SEQ ID NO: 18979 - protein, 42 aa, Artificial Sequence
  Synthetic polypeptide
VALFLPNGLQQIHQLWLEEYQQAAAKPVPFQEACSVHEVTLM

SEQ ID NO: 18980 - protein, 1469 aa, Artificial Sequence
  Synthetic polypeptide
ICGFAFYGFTYLWSVVVPKQVSLMGLEILSAFVDRLSTRFKSYVAMVIVALIDRMGDAKDKVRDEAQTLILKLMDQVAPPMYIWEQLASGFKHKNFRSREGVCLCLIETLNIFGAQPLVISKLIPHLCILFGDSNSQVRDAAILAIVEIYRHVGEKVRMDLYKRGIPPARLEMIFAKFDEVQSSGGMILSVCKDKSFDDEESVDGNRPSSAASAFKVPAPKTSGNPANSARKPGSAGGPKVGAGASKEGGAGAVDEDDFIKAFTDVPSIQIYSSRELEETLNKIREILSDDKHDWDQRANALKKIRSLLVAGAAQYDCFFQHLRLLDGALKLSAKDLRSQVVREACITVAHLSTVLGNKFDHGAEAIVPTLFNLVPNSAKVMATSGCAAIRFIIRHTHVPRLIPLITSNCTSKSVPVRRRSFEFLDLLLQEWQTHSLERHAAVLVETIKKGIHDADAEARVEARKTYMGLRNHFPGEAETLYNSLEPSYQKSLQTYLKSSGSVASLPQSDRSSSSSQESLNRPFSSKWSTANPSTVAGRVSAGSSKASSLPGSLQRSRSDIDVNAAAGAKAHHAAGQSVRSGRLGAGALNAGSYASLEDTSDKLDGTASEDGRVRAKLSAPLAGMGNAKADSRGRSRTKMVSQSQPGSRSGSPGRVLTTTALSTVSSGVQRVLVNSASAQKRSKIPRSQGCSREASPSRLSVARSSRIPRPSVSQGCSREASRESSRDTSPVRSFQPLGPGYGISQSSRLSSSVSAMRVLNTGSDVEEAVADALLLGDIRTKKKPARRRYESYGMHSDDDANSDASSACSERSYSSRNGSIPTYMRQTEDVAEVLNRCASSNWSERKEGLLGLQNLLKNQRTLSRVELKRLCEIFTRMFADPHGKVFSMFLETLVDFIQVHKDDLQDWLFVLLTQLLKKMGADLLGSVQAKVQKALDVTRESFPNDLQFNILMRFTVDQTQTPSLKVKVAILKYIETLAKQMDPGDFINSSETRLAVSRVITWTTEPKSSDVRKAAQSVLISLFELNTPEFTMLLGALPKTFQDGATKLLHNHLRNTGNGTQSSMGSPLTRPTPRSPANWSSPLTSPTNTSQNTLSPSAFDYDTENMNSEDIYSSLRGVTEAIQNFSFRSQEDMNEPLKRDSKKDDGDSMCGGPGMSDPRAGGDATDSSQTALDNKASLLHSMPTHSSPRSRDYNPYNYSDSISPFNKSALKEAMFDDDADQFPDDLSLDHSDLVAELLKELSNHNERVEERKIALYELMKLTQEESFSVWDEHFKTILLLLLETLGDKEPTIRALALKVLREILRHQPARFKNYAELTVMKTLEAHKDPHKEVVRSAEEAASVLATSISPEQCIKVLCPIIQTADYPINLAAIKMQTKVIERVSKETLNLLLPEIMPGLIQGYDNSESSVRKACVFCLVAVHAVIGDELKPHLSQLTGSKMKLLNLYIKRAQTGSGGADPTTDVSGQS

SEQ ID NO: 18981 - protein, 1460 aa, Artificial Sequence
  Synthetic polypeptide
ICGFAFYGFTYLWSVVVPKQVSLMGLEILSAFVDRLSTRFKSYVAMVIVALIDRMGDAKDKVRDEAQTLILKLMDQVAPPMYIWEQLASGFKHKNFRSREGVCLCLIETLNIFGAQPLVISKLIPHLCILFGDSNSQVRDAAILAIVEIYRHVGEKVRMDLYKRGIPPARLEMIFAKFDEVQSSGGMILSVCKDKSFDDEESVDGNRPSSAASAFKVPAPKTSGNPANSARKPGSAGGPKVGGASKEGGAGAVDEDDFIKAFTDVPSIQIYSSRELEETLNKIREILSDDKHDWDQRANALKKIRSLLVAGAAQYDCFFQHLRLLDGALKLSAKDLRSQVVREACITVAHLSTVLGNKFDHGAEAIVPTLFNLVPNSAKVMATSGCAAIRFIIRHTHVPRLIPLITSNCTSKSVPVRRRSFEFLDLLLQEWQTHSLERHAAVLVETIKKGIHDADAEARVEARKTYMGLRNHFPGEAETLYNSLEPSYQKSLQTYLKSSGSVASLPQSDRSSSSSQESLNRPFSSKWSTANPSTVAGRVSAGSSKASSLPGSLQRSRSDIDVNAAAGAKAHHAAGQSVRSGRLGAGALNAGSYASLEDTSDKLDGTASEDGRVRAKLSAPLAGMGNAKADSRGRSRTKMVSQSQPGSRSGSPGRVLTTTALSTVSSGVQRVLVNSASAQKRSKIPRSQGCSREASPSRLSVARSSRIPRPSVSQGCSREASRESSRDTSPVRSFQPLGPGYGISQSSRLSSSVSAMRVLNTGSDVEEAVADALKKPARRRYESYGMHSDDDANSDASSACSERSYSSRNGSIPTYMRQTEDVAEVLNRCASSNWSERKEGLLGLQNLLKNQRTLSRVELKRLCEIFTRMFADPHGKVFSMFLETLVDFIQVHKDDLQDWLFVLLTQLLKKMGADLLGSVQAKVQKALDVTRESFPNDLQFNILMRFTVDQTQTPSLKVKVAILKYIETLAKQMDPGDFINSSETRLAVSRVITWTTEPKSSDVRKAAQSVLISLFELNTPEFTMLLGALPKTFQDGATKLLHNHLRNTGNGTQSSMGSPLTRPTPRSPANWSSPLTSPTNTSQNTLSPSAFDYDTENMNSEDIYSSLRGVTEAIQNFSFRSQEDMNEPLKRDSKKDDGDSMCGGPGMSDPRAGGDATDSSQTALDNKASLLHSMPTHSSPRSRDYNPYNYSDSISPFNKSALKEAMFDDDADQFPDDLSLDHSDLVAELLKELSNHNERVEERKIALYELMKLTQEESFSVWDEHFKTILLLLLETLGDKEPTIRALALKVLREILRHQPARFKNYAELTVMKTLEAHKDPHKEVVRSAEEAASVLATSISPEQCIKVLCPIIQTADYPINLAAIKMQTKVIERVSKETLNLLLPEIMPGLIQGYDNSESSVRKACVFCLVAVHAVIGDELKPHLSQLTGSKMKLLNLYIKRAQTGSGGADPTTDVSGQS

SEQ ID NO: 18982 - protein, 1468 aa, Artificial Sequence
  Synthetic polypeptide
ICGFAFYGFTYLWSVVVPKQVSLMGLEILSAFVDRLSTRFKSYVAMVIVALIDRMGDAKDKVRDEAQTLILKLMDQVAPPMYIWEQLASGFKHKNFRSREGVCLCLIETLNIFGAQPLVISKLIPHLCILFGDSNSQVRDAAILAIVEIYRHVGEKVRMDLYKRGIPPARLEMIFAKFDEVQSSGGMILSVCKDKSFDDEESVDGNRPSSAASAFKVPAPKTSGNPANSARKPGSAGGPKVGGASKEGGAGAVDEDDFIKAFTDVPSIQIYSSRELEETLNKIREILSDDKHDWDQRANALKKIRSLLVAGAAQYDCFFQHLRLLDGALKLSAKDLRSQVVREACITVAHLSTVLGNKFDHGAEAIVPTLFNLVPNSAKVMATSGCAAIRFIIRHTHVPRLIPLITSNCTSKSVPVRRRSFEFLDLLLQEWQTHSLERHAAVLVETIKKGIHDADAEARVEARKTYMGLRNHFPGEAETLYNSLEPSYQKSLQTYLKSSGSVASLPQSDRSSSSSQESLNRPFSSKWSTANPSTVAGRVSAGSSKASSLPGSLQRSRSDIDVNAAAGAKAHHAAGQSVRSGRLGAGALNAGSYASLEDTSDKLDGTASEDGRVRAKLSAPLAGMGNAKADSRGRSRTKMVSQSQPGSRSGSPGRVLTTTALSTVSSGVQRVLVNSASAQKRSKIPRSQGCSREASPSRLSVARSSRIPRPSVSQGCSREASRESSRDTSPVRSFQPLGPGYGISQSSRLSSSVSAMRVLNTGSDVEEAVADALLLGDIRTKKKPARRRYESYGMHSDDDANSDASSACSERSYSSRNGSIPTYMRQTEDVAEVLNRCASSNWSERKEGLLGLQNLLKNQRTLSRVELKRLCEIFTRMFADPHGKVFSMFLETLVDFIQVHKDDLQDWLFVLLTQLLKKMGADLLGSVQAKVQKALDVTRESFPNDLQFNILMRFTVDQTQTPSLKVKVAILKYIETLAKQMDPGDFINSSETRLAVSRVITWTTEPKSSDVRKAAQSVLISLFELNTPEFTMLLGALPKTFQDGATKLLHNHLRNTGNGTQSSMGSPLTRPTPRSPANWSSPLTSPTNTSQNTLSPSAFDYDTENMNSEDIYSSLRGVTEAIQNFSFRSQEDMNEPLKRDSKKDDGDSMCGGPGMSDPRAGGDATDSSQTALDNKASLLHSMPTHSSPRSRDYNPYNYSDSISPFNKSALKEAMFDDDADQFPDDLSLDHSDLVAELLKELSNHNERVEERKIALYELMKLTQEESFSVWDEHFKTILLLLLETLGDKEPTIRALALKVLREILRHQPARFKNYAELTVMKTLEAHKDPHKEVVRSAEEAASVLATSISPEQCIKVLCPIIQTADYPINLAAIKMQTKVIERVSKETLNLLLPEIMPGLIQGYDNSESSVRKACVFCLVAVHAVIGDELKPHLSQLTGSKMKLLNLYIKRAQTGSGGADPTTDVSGQS

SEQ ID NO: 18983 - protein, 39 aa, Artificial Sequence
  Synthetic polypeptide
MWFCFLRFHLPVVSCSPKAGIINGIGNFKCLCGQIINTL

SEQ ID NO: 18984 - protein, 6 aa, Artificial Sequence
  Synthetic polypeptide
SQSRYH

SEQ ID NO: 18985 - protein, 73 aa, Artificial Sequence
  Synthetic polypeptide
KMWNYTGGHPSTVKAILMALGVGRLRHGSASTTTPTGSWSAPTRAAWSAAKASRTSGCTATPPGATALAPSSS

SEQ ID NO: 18986 - protein, 44 aa, Artificial Sequence
  Synthetic polypeptide
SGAQHGGSNLGRIVARAMVRKCGTTLEDTRVLLKQSSWLWAWGG

SEQ ID NO: 18987 - protein, 499 aa, Artificial Sequence
  Synthetic polypeptide
SNPHGSGRGEAETRECIYYNANWELERTNQSGLERCEGEQDKRLHCYASWRNSSGTIELVKKGCWLDDFNCYDRQECVATEENPQVYFCCCEGNFCNERFTHLPEAGGPEVTYEPPPTAPTLLTVLAYSLLPIGGLSLIVLLAFWMYRHRKPPYGHVDIHEDPGPPPPSPLVGLKPLQLLEIKARGRFGCVWKAQLMNDFVAVKIFPLQDKQSWQSEREIFSTPGMKHENLLQFIAAEKRGSNLEVELWLITAFHDKGSLTDYLKGNIITWNELCHVAETMSRGLSYLHEDVPWCRGEGHKPSIAHRDFKSKNVLLKSDLTAVLADFGLAVRFEPGKPPGDTHGQVGTRRYMAPEVLEGAINFQRDAFLRIDMYAMGLVLWELVSRCKAADGPVDEYMLPFEEEIGQHPSLEELQEVVVHKKMRPTIKDHWLKHPGLAQLCVTIEECWDHDAEARLSAGCVEERVSLIRRSVNGTTSDCLVSLVTSVTNVDLPPKESSI

SEQ ID NO: 18988 - protein, 14 aa, Artificial Sequence
  Synthetic polypeptide
STVWPSPWISSLNQ

SEQ ID NO: 18989 - protein, 11 aa, Artificial Sequence
  Synthetic polypeptide
VQCGLHHGSVP

SEQ ID NO: 18990 - protein, 361 aa, Artificial Sequence; identical to SEQ ID NO: 2325
  Synthetic polypeptide

SEQ ID NO: 18991 - protein, 35 aa, Artificial Sequence
  Synthetic polypeptide
AEIMPSHSSLGNRYHKACSTPGWGACSLWTGYFWF

SEQ ID NO: 18992 - protein, 17 aa, Artificial Sequence
  Synthetic polypeptide
PGQQIPQSLLHTWMGCM

SEQ ID NO: 18993 - protein, 1372 aa, Artificial Sequence
  Synthetic polypeptide
SQLLRRLRQENHLNPGGRGCIEPRSCHRTLAWATDTTKPAPHLDGVHVVFGLVISGFEVIEQIENLKTDAASRPYADVRVIDCGVLATKSIKDVFEKKRKKPTHSEGSDSSSNSSSSSESSSESELEHERSRRRKHKRRPKVKRSKKRRKEASSSEEPRNKHAMNPKGHSERSDTNEKRSVDSSAKREKPVVRPEEIPPVPENRFLLRRDMPVVTAEPEPKIPDVAPIVSDQKPSVSKSGRKIKGRGTIRYHTPPRSRSCSESDDDDSSETPPHWKEEMQRLRAYRPPSGEKWSKGDKLSDPCSSRWDERSLSQRSRSWSYNGYYSDLSTARHSGHHKKRRKEKKVKHKKKGKKQKHCRRHKQTKKRRILIPSDIESSKSSTRRMKSSCDRERSSRSSSLSSHHSSKRDWSKSDKDVQSSLTHSSRDSYRSKSHSQSYSRGSSRSRTASKSSSHSRSRSKSRSSSKSGHRKRASKSPRKTASQLSENKPVKTEPLRATMAQNENVVVQPVVAENIPVIPLSDSPPPSRWKPGQKPWKPSYERIQEMKAKTTHLLPIQSTYSLANIKETGSSSSYHKREKNSESDQSTYSKYSDRSSESSPRSRSRSSRSRSYSRSYTRSRSLASSHSRSRSPSSRSHSRNKYSDHSQCSRSSSYTSISSDDGRRAKRRLRSSGKKNSVSHKKHSSSSEKTLHSKYVKGRDRSSCVRKYSESRSSLDYSSDSEQSSVQATQSAQEKEKQGQMERTHNKQEKNRGEEKSKSERECPHSKKRTLKENLSDHLRNGSKPKRKNYAGSKWDSESNSERDVTKNSKNDSHPSSDKEEGEATSDSESEVSEIHIKVKPTTKSSTNTSLPDDNGAWKSSKQRTSTSDSEGSCSNSENNRGKPQKHKHGSKENLKREHTKKVKEKLKGKKDKKHKAPKRKQAFHWQPPLEFGEEEEEEIDDKQVTQESKEKKVSENNETIKDNILKTEKSSEEDLSGKHDTVTVSSDLDQFTKDDSKLSISPTALNTEENVACLQNIQHVEESVPNGVEDVLQTDDNMEICTPDRSSPAKVEETSPLGNARLDTPDINIVLKQDMATEHPQAEVVKQESSMSESKVLGEVGKQDSSSASLASAGESTGKKEVAEKSQINLIDKKWKPLQGVGNLAAPNAATSSAVEVKVLTTVPEMKPQGLRIEIKSKNKVRPGSLFDEVRKTARLNRRPRNQESSSDEQTPSRDDDSQSRSPSRSRSKSETKSRHRTRSVSYSHSRSRSRSSTSSYRSRSYSRSRSRGWYSRGRTRSRSSSYRSYKSHRTSSRSRSRSSSYDPHSRSRSYTYDSYYSRSRSRSRSQRSDSYHRGRSYNRRSRSCRSYGSDSESDRSYSHHRSPSESSRYS

SEQ ID NO: 18994 - protein, 97 aa, Artificial Sequence; identical to SEQ ID NO: 3665
  Synthetic polypeptide

SEQ ID NO: 18995 - protein, 18 aa, Artificial Sequence
  Synthetic polypeptide
KRCLLPLHLLPRFTHSWL

SEQ ID NO: 18996 - protein, 54 aa, Artificial Sequence; identical to SEQ ID NO: 5001
  Synthetic polypeptide

SEQ ID NO: 18997 - protein, 8 aa, Artificial Sequence
  Synthetic polypeptide
GESTHSWL

SEQ ID NO: 18998 - protein, 62 aa, Artificial Sequence
  Synthetic polypeptide
KHALLALKFILAFAIPDKPRHIQMKLARLEFESLEALKQQQMKLVTENLKEEPMESGKEKAT

SEQ ID NO: 18999 - protein, 25 aa, Artificial Sequence
  Synthetic polypeptide
WLPRTQSKVKARTPGFKVYTCICHT

SEQ ID NO: 19000 - protein, 33 aa, Artificial Sequence
  Synthetic polypeptide
DKDCPFLLLCYTCPQCLPHRSLKKIKKTVLKKS

SEQ ID NO: 19001 - protein, 36 aa, Artificial Sequence
  Synthetic polypeptide
DKDCPFLLLCYTCPQCLPHRSLKKIKKTVLSPGIQW

SEQ ID NO: 19002 - protein, 21 aa, Artificial Sequence
  Synthetic polypeptide
KFEEDKENSSKEILKVLEAVR

SEQ ID NO: 19003 - protein, 470 aa, Artificial Sequence
  Synthetic polypeptide
KFEEDKENSSKEILKVLEAVRQEKQKETAKCEQQMAKVQKLEESLLATEKVISSLEKSRDSDKKVVADLMNQIQELRTSVCEKTETIDTLKQELKDINCKYNSALVDREESRVLIKKQEVDILDLKETLRLRILSEDIERDMLCEDLAHATEQLNMLTEASKKHSGLLQSAQEELTKKEALIQELQHKLNQKKEEVEQKKNEYNFKMRQLEHVMDSAAEDPQSPKTPPHFQTHLAKLLETQEQEIEDGRASKTSLEHLVTKLNEDREVKNAEILRMKEQLREMENLRLESQQLIEKNWLLQGQLDDIKRQKENSDQNHPDNQQLKNEQEESIKERLAKSKIVEEMLKMKADLEEVQSALYNKEMECLRMTDEVERTQTLESKAFQEKEQLRSKLEEMYEERERTSQEMEMLRKQVECLAEENGKLVGHQNLHQKIQYVVRLKKENVRLAEETEKLRAENVFLKEKKRSES

SEQ ID NO: 19004 - protein, 24 aa, Artificial Sequence
  Synthetic polypeptide
KFEEDKENSSKPWYTVVNVELTSS

SEQ ID NO: 19005 - protein, 32 aa, Artificial Sequence
  Synthetic polypeptide
SRICDCPFECRTRTVLSSFFAILAHSACHIEV

SEQ ID NO: 19006 - protein, 5 aa, Artificial Sequence
  Synthetic polypeptide
EGYAL

SEQ ID NO: 19007 - protein, 23 aa, Artificial Sequence
  Synthetic polypeptide
IRCCRDELRGICSVRTWLMPLSS

SEQ ID NO: 19008 - protein, 333 aa, Artificial Sequence
  Synthetic polypeptide
TERDMLCEDLAHATEQLNMLTEASKKHSGLLQSAQEELTKKEALIQELQHKLNQKKEEVEQKKNEYNFKMRQLEHVMDSAAEDPQSPKTPPHFQTHLAKLLETQEQEIEDGRASKTSLEHLVTKLNEDREVKNAEILRMKEQLREMENLRLESQQLIEKNWLLQGQLDDIKRQKENSDQNHPDNQQLKNEQEESIKERLAKSKIVEEMLKMKADLEEVQSALYNKEMECLRMTDEVERTQTLESKAFQEKEQLRSKLEEMYEERERTSQEMEMLRKQVECLAEENGKLVGHQNLHQKIQYVVRLKKENVRLAEETEKLRAENVFLKEKKRSES

SEQ ID NO: 19009 - protein, 14 aa, Artificial Sequence
  Synthetic polypeptide
ASVTLIRIIQIINS

SEQ ID NO: 19010 - protein, 167 aa, Artificial Sequence
  Synthetic polypeptide
TPTPALSFCDPDQNHPDNQQLKNEQEESIKERLAKSKIVEEMLKMKADLEEVQSALYNKEMECLRMTDEVERTQTLESKAFQEKEQLRSKLEEMYEERERTSQEMEMLRKQVECLAEENGKLVGHQNLHQKIQYVVRLKKENVRLAEETEKLRAENVFLKEKKRSES

SEQ ID NO: 19011 - protein, 739 aa, Artificial Sequence
  Synthetic polypeptide
DCMSGPCPFGEVQLQPSTSLLPTLNRTFIWDVKAHKSIGLELQFSIPRLRQIGPGESCPDGVTHSISGRIDATVVRIGTFCSNGTVSRIKMQEGVKMALHLPWFHPRNVSGFSIANRSSIKRLCIIESVFEGEGSATLMSANYPEGFPEDELMTWQFVVPAHLRASVSFLNFNLSNCERKEERVEYYIPGSTTNPEVFKLEDKQPGNMAGNFNLSLQGCDQDAQSPGILRLQFQVLVQHPQNESNKIYVVDLSNERAMSLTIEPRPVKQSRKFVPGCFVCLESRTCSSNLTLTSGSKHKISFLCDDLTRLWMNVEKTISCTDHRYCQRKSYSLQVPSDILHLPVELHDFSWKLLVPKDRLSLVLVPAQKLQQHTHEKPCNTSFSYLVASAIPSQDLYFGSFCPGGSIKQIQVKQNISVTLRTFAPSFQQEASRQGLTVSFIPYFKEEGVFTVTPDTKSKVYLRTPNWDRGLPSLTSVSWNISVPRDQVACLTFFKERSGVVCQTGRAFMIIQEQRTRAEEIFSLDEDVLPKPSFHHHSFWVNISNCSPTSGKQLDLLFSVTLTPRTVDLTVILIAAVGGGVLLLSALGLIICCVKKKKKKTNKGPAVGIYNDNINTEMPRQPKKFQKGRKDNDSHVYAVIEDTMVYGHLLQDSSGSFLQPEVDTYRPFQGTMGVCPPSPPTICSRAPTAKLATEEPPPRSPPESESEPYTFSHPNNGDVSSKDTDIPLLNTQEPMEPAE

SEQ ID NO: 19012 - protein, 246 aa, Artificial Sequence
  Synthetic polypeptide
DCMSGPCPFGEVQLQPSTSLLPTLNRTFIWDVKAHKSIGLELQFSIPRLRQIGPGESCPDGVTHSISGRIDATVVRIGTFCSNGTVSRIKMQEGVKMALHLPWFHPRNVSGFSIANRSSIKRLCIIESVFEGEGSATLMSANYPEGFPEDELMTWQFVVPAHLRASVSFLNFNLSNCERKEERVEYYIPGSTTNPEVFKLEDKQPGNMAGNFNLSLQGCDQDAQSPGILRLQFQVLVQHPQNESSE

SEQ ID NO: 19013 - protein, 51 aa, Artificial Sequence; identical to SEQ ID NO: 5108
  Synthetic polypeptide

SEQ ID NO: 19014 - protein, 55 aa, Artificial Sequence; identical to SEQ ID NO: 4883
  Synthetic polypeptide

SEQ ID NO: 19015 - protein, 18 aa, Artificial Sequence
  Synthetic polypeptide
LTMGMLTLFTIQGTVVTR

SEQ ID NO: 19016 - protein, 44 aa, Artificial Sequence
  Synthetic polypeptide
RCKKTKSNNSGREIEIEHKWSIEEVADHGNADTIHHSRDSSYKI

SEQ ID NO: 19017 - protein, 48 aa, Artificial Sequence
  Synthetic polypeptide
RCKKTKSNNSGREIEIEHKWSIEEVADHGNADTIHHSRDSSYKIIKPS

SEQ ID NO: 19018 - protein, 23 aa, Artificial Sequence
  Synthetic polypeptide
GSGWGQESWSPALGVPLMAACCR

SEQ ID NO: 19019 - protein, 40 aa, Artificial Sequence; identical to SEQ ID NO: 5785
  Synthetic polypeptide

SEQ ID NO: 19020 - protein, 43 aa, Artificial Sequence; identical to SEQ ID NO: 5559
  Synthetic polypeptide

SEQ ID NO: 19021 - protein, 491 aa, Artificial Sequence; identical to SEQ ID NO: 2060
  Synthetic polypeptide

SEQ ID NO: 19022 - protein, 247 aa, Artificial Sequence; identical to SEQ ID NO: 2674
  Synthetic polypeptide

SEQ ID NO: 19023 - protein, 483 aa, Artificial Sequence; identical to SEQ ID NO: 2064
  Synthetic polypeptide

SEQ ID NO: 19024 - protein, 528 aa, Artificial Sequence; identical to SEQ ID NO: 1967
  Synthetic polypeptide

SEQ ID NO: 19025 - protein, 49 aa, Artificial Sequence; identical to SEQ ID NO: 5244
  Synthetic polypeptide

SEQ ID NO: 19026 - protein, 11 aa, Artificial Sequence
  Synthetic polypeptide
ASPVSAKRRAV

SEQ ID NO: 19027 - protein, 350 aa, Artificial Sequence
  Synthetic polypeptide
KKGSLKMANYTLAPEDEYDVLIEGELESDEAEQCDKYDAQALSAQLVPSLCSAVFVIGVLDNLLVVLILVKYKGLKRVENIYLLNLAVSNLCFLLTLPFWAHAGGDPMCKILIGLYFVGLYSETFFNCLLTVQRYLVFLHKGNFFSARRRVPCGIITSVLAWVTAILATLPEFVVYKPQMEDQKYKCAFSRTPFLPADETFWKHFLTLKMNISVLVLPLFIFTFLYVQMRKTLRFREQRYSLFKLVFAIMVVFLLMWAPYNIAFFLSTFKEHFSLSDCKSSYNLDKSVHITKLIATTHCCINPLLYAFLDGTFSKYLCRCFHLRSNTPLQPRGQSAQGTSREEPDHSTEV

SEQ ID NO: 19028 - protein, 33 aa, Artificial Sequence
  Synthetic polypeptide
YIFSYILCSCRQVLFLLKEGQSEDGQLHAGTRG

SEQ ID NO: 19029 - protein, 47 aa, Artificial Sequence
  Synthetic polypeptide
GQARWFTPVIPALWEAKFQFLADLIDEYQSVLRPITLMRKRKIQIQG

SEQ ID NO: 19030 - protein, 333 aa, Artificial Sequence
  Synthetic polypeptide
PGAVVHTCNPSTLGGQVPVPSRFNRRVSVCAETYNPDEEEEDTDPRVIHPKTDEQRCRLQEACKDILLFKNLDQEQLSQVLDAMFERIVKADEHVIDQGDDGDNFYVIERGTYDILVTKDNQTRSVGQYDNRGSFGELALMYNTPRAATIVATSEGSLWGLDRVTFRRIIVKNNAKKRKMFESFIESVPLLKSLEVSERMKIVDVIGEKIYKDGERIITQGEKADSFYIIESGEVSILIRSRTKSNKDGGNQEVEIARCHKGQYFGELALVTNKPRAASAYAVGDVKCLVMDVQAFERLLGPCMDIMKRNISHYEEQLVKMFGSSVDLGNLGQ

SEQ ID NO: 19031 - protein, 311 aa, Artificial Sequence
  Synthetic polypeptide
PGAVVHTCNPSTLGGQVPVPSRFNRRVSVCAETYNPDEEEEDTDPRVIHPKTDEQRCRLQEACKDILLFKNLDQEQLSQVLDAMFERIVKADEHVIDQGDDGDNFYVIERGTYDILVTKDNQTRSVGQYDNRGSFGELALMYNTPRAATIVATSEGSLWGLDRVTFRRIIVKNNAKKRKMFESFIESVPLLKSLEVSERMKIVDVIGEKIYKDGERIITQTKSNKDGGNQEVEIARCHKGQYFGELALVTNKPRAASAYAVGDVKCLVMDVQAFERLLGPCMDIMKRNISHYEEQLVKMFGSSVDLGNLGQ

SEQ ID NO: 19032 - protein, 11 aa, Artificial Sequence
  Synthetic polypeptide
SQHFGRPSSSS

SEQ ID NO: 19033 - protein, 41 aa, Artificial Sequence
  Synthetic polypeptide
AQEFKTSLDNMFQFLADLIDEYQSVLRPITLMRKRKIQIQG

SEQ ID NO: 19034 - protein, 37 aa, Artificial Sequence
  Synthetic polypeptide
GQAQWLTPVIPALQEAEAGDCFEPRSSRPAWTTCSSS

SEQ ID NO: 19035 - protein, 341 aa, Artificial Sequence
  Synthetic polypeptide
SQHFRRLRRAIALSPGVQDQPGQHVPVPSRFNRRVSVCAETYNPDEEEEDTDPRVIHPKTDEQRCRLQEACKDILLFKNLDQEQLSQVLDAMFERIVKADEHVIDQGDDGDNFYVIERGTYDILVTKDNQTRSVGQYDNRGSFGELALMYNTPRAATIVATSEGSLWGLDRVTFRRIIVKNNAKKRKMFESFIESVPLLKSLEVSERMKIVDVIGEKIYKDGERIITQGEKADSFYIIESGEVSILIRSRTKSNKDGGNQEVEIARCHKGQYFGELALVTNKPRAASAYAVGDVKCLVMDVQAFERLLGPCMDIMKRNISHYEEQLVKMFGSSVDLGNLGQ

SEQ ID NO: 19036 - protein, 319 aa, Artificial Sequence
  Synthetic polypeptide
SQHFRRLRRAIALSPGVQDQPGQHVPVPSRFNRRVSVCAETYNPDEEEEDTDPRVIHPKTDEQRCRLQEACKDILLFKNLDQEQLSQVLDAMFERIVKADEHVIDQGDDGDNFYVIERGTYDILVTKDNQTRSVGQYDNRGSFGELALMYNTPRAATIVATSEGSLWGLDRVTFRRIIVKNNAKKRKMFESFIESVPLLKSLEVSERMKIVDVIGEKIYKDGERIITQTKSNKDGGNQEVEIARCHKGQYFGELALVTNKPRAASAYAVGDVKCLVMDVQAFERLLGPCMDIMKRNISHYEEQLVKMFGSSVDLGNLGQ

SEQ ID NO: 19037 - protein, 181 aa, Artificial Sequence
  Synthetic polypeptide
GYVLPSHVTEEMLWECKQLGAHSPSTLLTTLMFFNTKYFLLKTVDQHMKLAFSKVLRQTKKNPSNPKDKSTSIRYLKALGIHQTGQKVTDDMYAEQTENPENPLRCPIKLYDFYLFKCPQSVKGRNDTFYLTPEPVVAPNSPIWYSVQPISREQMGQMLTRILVIREIQEAIAVANASTMH

SEQ ID NO: 19038 - protein, 16 aa, Artificial Sequence
  Synthetic polypeptide
SQLLGRLRLCLAQPRD

SEQ ID NO: 19039 - protein, 20 aa, Artificial Sequence
  Synthetic polypeptide
WCTPVIPATREAEAMSCPAT

SEQ ID NO: 19040 - protein, 181 aa, Artificial Sequence; identical to SEQ ID NO: 19037
  Synthetic polypeptide

SEQ ID NO: 19041 - protein, 34 aa, Artificial Sequence
  Synthetic polypeptide
NPISTKNTKISQVCWQVPVIPATREAEAMSCPAT

SEQ ID NO: 19042 - protein, 16 aa, Artificial Sequence
  Synthetic polypeptide
SQLHGRLRLCLAQPRD

SEQ ID NO: 19043 - protein, 23 aa, Artificial Sequence
  Synthetic polypeptide
HGETPSLLKIQKLARLCLAQPRD

SEQ ID NO: 19044 - protein, 19 aa, Artificial Sequence
  Synthetic polypeptide
NPISTKNTKISQAMSCPAT

SEQ ID NO: 19045 - protein, 182 aa, Artificial Sequence
  Synthetic polypeptide
PGYVLPSHVTEEMLWECKQLGAHSPSTLLTTLMFFNTKYFLLKTVDQHMKLAFSKVLRQTKKNPSNPKDKSTSIRYLKALGIHQTGQKVTDDMYAEQTENPENPLRCPIKLYDFYLFKCPQSVKGRNDTFYLTPEPVVAPNSPIWYSVQPISREQMGQMLTRILVIREIQEAIAVANASTMH

SEQ ID NO: 19046 - protein, 7 aa, Artificial Sequence
  Synthetic polypeptide
GSNCPGC

SEQ ID NO: 19047 - protein, 35 aa, Artificial Sequence
  Synthetic polypeptide
LEPGRQRLRLKLSRLLKLNHSHSHSLPQNFCFQIL

SEQ ID NO: 19048 - protein, 337 aa, Artificial Sequence
  Synthetic polypeptide
TRETEVEAQTVQVAEVEPQSQPQPSPELLLPNSLKPEEGLEVWKNWAQTKNAELEKDAQNRLAPIGRRQLLRFQEDLISSAVAELNYGLCLMTREARNGEGEPYDPDVLYYIFLCIQKYLFENGRVDDIFSDLYYVRFTEWLHEVLKDVQPRVTPLGYVLPSHVTEEMLWECKQLGAHSPSTLLTTLMFFNTKYFLLKTVDQHMKLAFSKVLRQTKKNPSNPKDKSTSIRYLKALGIHQTGQKVTDDMYAEQTENPENPLRCPIKLYDFYLFKCPQSVKGRNDTFYLTPEPVVAPNSPIWYSVQPISREQMGQMLTRILVIREIQEAIAVANASTMH

SEQ ID NO: 19049 - protein, 94 aa, Artificial Sequence
  Synthetic polypeptide
HSGPQLTQLQSKGCWGVREEHHRQADEDHPRGWLLRGGMPAVPGGCLQQHHPVHHGHCQSHGQPADRLCRPLQSGRRQAAICTVLHRRGARRAP

SEQ ID NO: 19050 - protein, 88 aa, Artificial Sequence
  Synthetic polypeptide
LSCKARGAGESGKSTIVKQMKIIHEDGYSEEECRQYRAVVYSNTIQSIMAIVKAMGNLQIDFADPSRADDARQLFALSCTAEEQGVLP

SEQ ID NO: 19051 - protein, 322 aa, Artificial Sequence
  Synthetic polypeptide
LSCKARGAGESGKSTIVKQMKIIHEDGYSEEECRQYRAVVYSNTIQSIMAIVKAMGNLQIDFADPSRADDARQLFALSCTAEEQGVLPDDLSGVIRRLWADHGVQACFGRSREYQLNDSAAYYLNDLERIAQSDYIPTQQDVLRTRVKTTGIVETHFTFKDLHFKMFDVGGQRSERKKWIHCFEGVTAIIFCVALSAYDLVLAEDEEMNRMHESMKLFDSICNNKWFTDTSIILFLNKKDLFEEKITHSPLTICFPEYTGANKYDEAASYIQSKFEDLNKRKDTKEIYTHFTCATDTKNVQFVFDAVTDVIIKNNLKDCGLF

SEQ ID NO: 19052 - protein, 26 aa, Artificial Sequence
  Synthetic polypeptide
PLWTSADSAAKQGVLGSQGRAPSSSR

SEQ ID NO: 19053 - protein, 275 aa, Artificial Sequence
  Synthetic polypeptide
ALWLTSVIPALWEAEEVLVPEASEFDEWEPEGTTLEGPVTAVIPTWQALTTLDLSHNSVSEIDESVKLIPKIEFLDLSHNGLLVVDNLQHLYNLVHLDLSYNKLSSLEGLHTKLGNIKTLNLAGNLLESLSGLHKLYSLVNLDLRDNRIEQMEEVRSIGSLPCLEHVSLLNNPLSIIPDYRTKVLAQFGERASEVCLDDTVTTEKELDTVEVLKAIQKAKEVKSKLSNPEKKGGEDSRLSAAPCIRPSSSPPTVAPASASLPQPILSNQGILGDE

SEQ ID NO: 19054 - protein, 1264 aa, Artificial Sequence
  Synthetic polypeptide
ALWLTSVIPALWEAEEVLVPEASEFDEWEPEGTTLEGPVTAVIPTWQALTTLDLSHNSVSEIDESVKLIPKIEFLDLSHNGLLVVDNLQHLYNLVHLDLSYNKLSSLEGLHTKLGNIKTLNLAGNLLESLSGLHKLYSLVNLDLRDNRIEQMEEVRSIGSLPCLEHVSLLNNPLSIIPDYRTKVLAQFGERASEVCLDDTVTTEKELDTVEVLKAIQKAKEVKSKLSNPEKKGGEDSRLSAAPCIRPSSSPPTVAPASASLPQPILSNQGIMFVQEEALASSLSSTDSLTPEHQPIAQGCSDSLESIPAGQAASDDLRDVPGAVGGASPEHAEPEVQVVPGSGQIIFLPFTCIGYTATNQDFIQRLSTLIRQAIERQLPAWIEAANQREEGQGEQGEEEDEEEEEEEDVAENRYFEMGPPDVEEEEGGGQGEEEEEEEEDEEAEEERLALEWALGADEDFLLEHIRILKVLWCFLIHVQGSIRQFAACLVLTDFGIAVFEIPHQESRGSSQHILSSLRFVFCFPHGDLTEFGFLMPELCLVLKVRHSENTLFIISDAANLHEFHADLRSCFAPQHMAMLCSPILYGSHTSLQEFLRQLLTFYKVAGGCQERSQGCFPVYLVYSDKRMVQTAAGDYSGNIEWASCTLCSAVRRSCCAPSEAVKSAAIPYWLLLTPQHLNVIKADFNPMPNRGTHNCRNRNSFKLSRVPLSTVLLDPTRSCTQPRGAFADGHVLELLVGYRFVTAIFVLPHEKFHFLRVYNQLRASLQDLKTVVIAKTPGTGGSPQGSFADGQPAERRASNDQRPQEVPAEALAPAPAEVPAPAPAAASASGPAKTPAPAEASTSALVPEETPVEAPAPPPAEAPAQYPSEHLIQATSEENQIPSHLPACPSLRHVASLRGSAIIELFHSSIAEVENEELRHLMWSSVVFYQTPGLEVTACVLLSTKAVYFVLHDGLRRYFSEPLQDFWHQKNTDYNNSPFHISQCFVLKLSDLQSVNVGLFDQHFRLTGSTPMQVVTCLTRDSYLTHCFLQHLMVVLSSLERTPSPEPVDKDFYSEFGNKTTGKMENYELIHSSRVKFTYPSEEEIGDLTFTVAQKMAEPEKAPALSILLYVQAFQVGMPPPGCCRGPLRPKTLLLTSSEIFLLDEDCVHYPLPEFAKEPPQRDRYRLDDGRRVRDLDRVLMGYQTYPQALTLVFDDVQGHDLMGSVTLDHFGEVPGGPARASQGREVQWQVFVPSAESREKLISLLARQWEALCGRELPVELTG

SEQ ID NO: 19055 - protein, 343 aa, Artificial Sequence
  Synthetic polypeptide
ALWLTSVIPALWEAEEVLVPEASEFDEWEPEGTTLEGPVTAVIPTWQALTTLDLSHNSVSEIDESVKLIPKIEFLDLSHNGLLVVDNLQHLYNLVHLDLSYNKLSSLEGLHTKLGNIKTLNLAGNLLESLSGLHKLYSLVNLDLRDNRIEQMEEVRSIGSLPCLEHVSLLNNPLSIIPDYRTKVLAQFGERASEVCLDDTVTTEKELDTVEVLKAIQKAKEVKSKLSNPEKKGGEDSRLSAAPCIRPSSSPPTVAPASASLPQPILSNQGNRVCILLLVEPHSPAWAPWLGWGWGRGASTCFQQGQTQGGQCLLQAGPRGGTHGRGAWPDASCCLLGEDSQLL

SEQ ID NO: 19056 - protein, 5 aa, Artificial Sequence
  Synthetic polypeptide
GSPCS

SEQ ID NO: 19057 - protein, 27 aa, Artificial Sequence
  Synthetic polypeptide
SQHFGRLRKSLFLKPQNLMSGSLKAQP

SEQ ID NO: 19058 - protein, 337 aa, Artificial Sequence
  Synthetic polypeptide
EVPFASRHDSEASPAMWNFKRFREPKHERRPWRIWFLDTSKQAIGMLFIHFANVYLADLTEEDPCSLYLINFLLDATVGMLLIYVGVRAVSVLVEWQQWESLRFGEYGDPLQCGAWVGQCALYIVIMIFEKSVVFIVLLILQWKKVALLNPIENPDLKLAIVMLIVPFFVNALMFWVVDNFLMRKGKTKAKLEERGANQDSRNGSKVRYRRAASHEESESEILISADDEMEESDVEEDLRRLTPLKPVKKKKHRFGLPAGAQEAPIKKKRPPVKDEDLKGARGNLTKNQEIKSKTYQVMRECEQAGSAAPSVFSRTRTGTETVFEKPKAGPTKSVFG

SEQ ID NO: 19059 - protein, 259 aa, Artificial Sequence
  Synthetic polypeptide
EVPFASRHDSEASPAMWNFKRFREPKHERRPWRIWFLDTSKQAIGMLFIHFANVYLADLTEEDPCSLYLINFLLDATVGMLLIYVGVRAVSVLVEWQQWESLRFGEYGDPLQCGAWVGQCALYIVIMIFEKSVVFIVLLILQWKKVALLNPIENPDLKLAIVMLIVPFFVNALMFWVVDNFLMRKGKTKAKLEERGANQDSRNGSKVRYRRAASHEESESEILISADDEMEESDVEEDLRRLTPLKPVKKKKHRFGLPV

SEQ ID NO: 19060 - protein, 56 aa, Artificial Sequence
  Synthetic polypeptide
FYQRFPFFHLPHFLLPPPCKKCLLPPAMILRPPQPCGTSNASENQSMKDVRGGYGF

SEQ ID NO: 19061 - protein, 16 aa, Artificial Sequence
  Synthetic polypeptide
GLPSHVELQTLQRTKA

SEQ ID NO: 19062 - protein, 50 aa, Artificial Sequence
  Synthetic polypeptide
IKRIKKTSFSTTTLLPPIKVLVVYPSEICFHHTICYFTEFLQNHCRSEVI

SEQ ID NO: 19063 - protein, 188 aa, Artificial Sequence
  Synthetic polypeptide
IKRIKKTSFSTTTLLPPIKVLVVYPSEICFHHTICYFTEFLQNHCRSEVILEKWQKKKIAEMGPVQWLATQKKAADKVVFLLSNDVNSVCDGTCGKSEGSPSENSQDLFPLAFNLFCSDLRSQIHLHKYVVVYFREIDTKDDYNALSVCPKYHLMKDATAFCAELLHVKQQVSAGKRSQACHDGCCSL

SEQ ID NO: 19064 - protein, 78 aa, Artificial Sequence
  Synthetic polypeptide
PLPPLPRQPTQQDDDKNKDLSDGPLPFNELKGSRRLPFLPPHYCPPLRFLWFTHLKYVSITQFVTSLNFFKTIAEVRS

SEQ ID NO: 19065 - protein, 87 aa, Artificial Sequence
  Synthetic polypeptide
PLPPLPRQPTQQDDDKNKDLSDGPLPFNELKGSRRLPFLPPHYCPPLRFLWFTHLKYVSITQFVTSLNFFKTIAEVRSSLKSGRKRK

SEQ ID NO: 19066 - protein, 87 aa, Artificial Sequence
  Synthetic polypeptide
FLHFHLRYRVHLTRECQRVGAGQVLDSRSQSPWRLSLITDFFWGIAEFVVLFFKTLLQQDVKKRRSYGNSSDSRYDDGRGKPSPKNG

SEQ ID NO: 19067 - protein, 106 aa, Artificial Sequence
  Synthetic polypeptide
FLHFHLRYRVHLTRECQRVGAGQVLDSRSQSPWRLSLITDFFWGIAEFVVLFFKTLLQQDVKKRRSYGNSSDSRYDDGRGPPGNPPRRMGRINHLRGPSPPPMAGG

SEQ ID NO: 19068 - protein, 30 aa, Artificial Sequence
  Synthetic polypeptide
GTGFISLGSAREWAQDKCWTAGVSLHGDYL

SEQ ID NO: 19069 - protein, 32 aa, Artificial Sequence
  Synthetic polypeptide
GVPESGRRTSVGQPESVSMEIIFDNRFLLGNS

SEQ ID NO: 19070 - protein, 31 aa, Artificial Sequence
  Synthetic polypeptide
FLHFHLRTSVGQPESVSMEIIFDNRFLLGNS

SEQ ID NO: 19071 - protein, 66 aa, Artificial Sequence
  Synthetic polypeptide
GQVLDSRSQSPWRLSLITDFFWGIAEFVVLFFKTLLQQDVKKRRSYGNSSDSRYDDGRGKPSPKNG

SEQ ID NO: 19072 - protein, 85 aa, Artificial Sequence
  Synthetic polypeptide
GQVLDSRSQSPWRLSLITDFFWGIAEFVVLFFKTLLQQDVKKRRSYGNSSDSRYDDGRGPPGNPPRRMGRINHLRGPSPPPMAGG

SEQ ID NO: 19073 - protein, 47 aa, Artificial Sequence
  Synthetic polypeptide
GRSQDGRIGTAPVYSSQRERRRRRVISAFPSEDKCWTAGVSLHGDYL

SEQ ID NO: 19074 - protein, 47 aa, Artificial Sequence
  Synthetic polypeptide
CENQLFWKKKEKPIEIKLRNPLNKYRFFKPNCRGYTSILRISGRRRT

SEQ ID NO: 19075 - protein, 91 aa, Artificial Sequence
  Synthetic polypeptide
CENQLFWKKKEKPIEIKLRNPLNKYRFFKPNCRGYTSILRISGRRRTVKSQVLEMNCLVPEMKFCSFIKQQQRLPLSGTLTLLLYKKSLRR

SEQ ID NO: 19076 - protein, 29 aa, Artificial Sequence
  Synthetic polypeptide
GELQLLYLHTVDVKINSFGRRKKSLSKSS

SEQ ID NO: 19077 - protein, 45 aa, Artificial Sequence
  Synthetic polypeptide
KSTLLEEERKAYRNQVEESTKQIQVLQAQLQRLHIDTENLREEKD

SEQ ID NO: 19078 - protein, 94 aa, Artificial Sequence
  Synthetic polypeptide
KSTLLEEERKAYRNQVEESTKQIQVLQAQLQRLHIDTENLREEKDSEITSTRDELLSARDEILLLHQAAAKVASERDTDIASLQEELKKVRAEL

SEQ ID NO: 19079 - protein, 256 aa, Artificial Sequence
  Synthetic polypeptide
KSTLLEEERKAYRNQVEESTKQIQVLQAQLQRLHIDTENLREEKDSEITSTRDELLSARDEILLLHQAAAKVASERDTDIASLQEELKKVRAELERWRKAASEYEKEITSLQNSFQLRCQQCEDQQREEATRLQGELEKLRKEWNALETECHSLKRENVLLSSELQRQEKELHNSQKQSLELTSDLSILQMSRKELENQVGSLKEQHLRDSADLKTLLSKAENQAKDVQKEVKRKDIMSPIMVGLKAKSKSDIHAS

SEQ ID NO: 19080 - protein, 306 aa, Artificial Sequence
  Synthetic polypeptide
KSTLLEEERKAYRNQVEESTKQIQVLQAQLQRLHIDTENLREEKDSEITSTRDELLSARDEILLLHQAAAKVASERDTDIASLQEELKKVRAELERWRKAASEYEKEITSLQNSFQLRCQQCEDQQREEATRLQGELEKLRKEWNALETECHSLKRENVLLSSELQRQEKELHNSQKQSLELTSDLSILQMSRKELENQVGSLKEQHLRDSADLKTLLSKAENQAKDVQKEYEKTQTVLSELKLKFEMTEQEKQSITDELKQCKNNLKLLREKGNNKPWPWMPMLAALVAVTAIVLYVPGLARASP

SEQ ID NO: 19081 - protein, 303 aa, Artificial Sequence
  Synthetic polypeptide
KSTLLEEERKAYRNQVEESTKQIQVLQAQLQRLHIDTENLREEKDSEITSTRDELLSARDEILLLHQAAAKVASERDTDIASLQEELKKVRAELERWRKAASEYEKEITSLQNSFQLRCQQCEDQQREEATRLQGELEKLRKEWNALETECHSLKRENVLLSSELQRQEKELHNSQKQSLELTSDLSILQMSRKELENQVGSLKEQHLRDSADLKTLLSKAENQAKDVQKEYEKTQTVLSELKLKFEMTEQEKQSITDELKQCKNNLKLLREKGNNPSILQPVPAVFIGLFLAFLFWCFGPLW

SEQ ID NO: 19082 - protein, 39 aa, Artificial Sequence
  Synthetic polypeptide
HRRNILFECKEEFLWKTAGRLLEDTVTLICLTTAYRLQA

SEQ ID NO: 19083 - protein, 21 aa, Artificial Sequence
  Synthetic polypeptide
IEGIYYSSAKRNFCGKQLADC

SEQ ID NO: 19084 - protein, 89 aa, Artificial Sequence
  Synthetic polypeptide
KEYIIRVQRGISVENSWQIVRRYSDFDLLNNSLQIAGLSLPLPPKKLIGNMDREFIAERQKGLQNYLNVITTNHILSNCELVKKFLDPN

SEQ ID NO: 19085 - protein, 108 aa, Artificial Sequence
  Synthetic polypeptide
KEYIIRVQRGISVENSWQIVRRYSDFDLLNNSLQIAGLSLPLPPKKLIGNMDREFIAERQKGLQNYLNVITTNHILSNCELVKKFLDPNNYSANYTAPLHLSGYLCHS

SEQ ID NO: 19086 - protein, 545 aa, Artificial Sequence
  Synthetic polypeptide
KEYIIRVQRGISVENSWQIVRRYSDFDLLNNSLQIAGLSLPLPPKKLIGNMDREFIAERQKGLQNYLNVITTNHILSNCELVKKFLDPNNYSANYTEIALQQVSMFFRSEPKWEVVEPLKDIGWRIRKKYFLMKIKNQPKERLVLSWADLGPDKYLSDKDFQCLIKLLPSCLHPYIYRVTFATANESSALLIRMFNEKGTLKDLIYKAKPKDPFLKKYCNPKKIQGLELQQIKTYGRQILEVLKFLHDKGFPYGHLHASNVMLDGDTCRLLDLENSLLGLPSFYRSYFSQFRKINTLESVDVHCFGHLLYEMTYGRPPDSVPVDSFPPAPSMAVVAVLESTLSCEACKNGMPTISRLLQMPLFSDVLLTTSEKPQFKIPTKLKEALRIAKECIEKRLIEEQKQIHQHRRLTRAQSHHGSEEERKKRKILARKKSKRSALENSEEHSAKYSNSNNSAGSGASSPLTSPSSPTPPSTSGISALPPPPPPPPPPAAPLPPASTEAPAQLSSQAVNGMSRGALLSSIQNFQKGTLRKAKTCDHSAPKIG

SEQ ID NO: 19087 - protein, 482 aa, Artificial Sequence
  Synthetic polypeptide
KEYIIRVQRGISVENSWQIVRRYSDFDLLNNSLQIAGLSLPLPPKKLIGNMDREFIAERQKGLQNYLNVITTNHILSNCELVKKFLDPNNYSANYTEIALQQVSMFFRSEPKWEVVEPLKDIGWRIRKKYFLMKIKNQPKERLVLSWADLGPDKYLSDKDFQCLIKLLPSCLHPYIYRVTFATANESSALLIRMFNEKGTLKDLIYKAKPKDPFLKKYCNPKKIQGLELQQIKTYGRQILEVLKFLHDKGFPYGHLHASNVMLDGDTCRLLDLENSLLGLPSFYRSYFSQFRKINTLESVDVHCFGHLLYEMTYGRPPDSVPVDSFPPAPSMAVVAVLESTLSCEACKNGMPTISRLLQMPLFSDVLLTTSEKPQFKIPTKLKEALRIAKECIEKRLIEEQKQIHQHRRLTRAQSHHGSEEERKKRKILARKKSKRSALENSEEHSAKYSNSNNSAGSGASSPLTSPSSPTPPSTSVEHAPF

SEQ ID NO: 19088 - protein, 126 aa, Artificial Sequence
  Synthetic polypeptide
EQLQSTAPSVSDAEDRISISKQLASVKALRKCSDLEKAIATTALIFRNSSDSDGKLEKAIAKDLLQTQFRNFAEGQETKPKYREILSELDEHTENKLDFEDFMILLLSITVMSDLLQNIRNVKIMK

SEQ ID NO: 19089 - protein, 145 aa, Artificial Sequence
  Synthetic polypeptide
EQLQSTAPSVSDAEDRISISKQLASVKALRKCSDLEKAIATTALIFRNSSDSDGKLEKAIAKDLLQTQFRNFAELPFTFYHEWKQPEVLTTCRCLILNFPAIRIGQETKPKYREILSELDEHTENKLDFEDFMILLLSITVMSDL

SEQ ID NO: 19090 - protein, 98 aa, Artificial Sequence
  Synthetic polypeptide
EQLQSTAPSVSDAEDRISISKQLASVKALRKCSDLEKAIATTALIFRNSSDSDGKLEKAIAKDLLQTQFRNFAEPCEDSRRSWPSAKLEESTLSRHWI

SEQ ID NO: 19091 - protein, 38 aa, Artificial Sequence
  Synthetic polypeptide
RRRQDFNIQTTGFSESSEEVLRSGKSYCHHCSDFQKFF

SEQ ID NO: 19092 - protein, 15 aa, Artificial Sequence
  Synthetic polypeptide
VTQKTGFQYPNNWLQ

SEQ ID NO: 19093 - protein, 117 aa, Artificial Sequence
  Synthetic polypeptide
FLHFQLRISISKQLASVKALRKCSDLEKAIATTALIFRNSSDSDGKLEKAIAKDLLQTQFRNFAEGQETKPKYREILSELDEHTENKLDFEDFMILLLSITVMSDLLQNIRNVKIMK

SEQ ID NO: 19094 - protein, 136 aa, Artificial Sequence
  Synthetic polypeptide
FLHFQLRISISKQLASVKALRKCSDLEKAIATTALIFRNSSDSDGKLEKAIAKDLLQTQFRNFAELPFTFYHEWKQPEVLTTCRCLILNFPAIRIGQETKPKYREILSELDEHTENKLDFEDFMILLLSITVMSDL

SEQ ID NO: 19095 - protein, 89 aa, Artificial Sequence
  Synthetic polypeptide
FLHFQLRISISKQLASVKALRKCSDLEKAIATTALIFRNSSDSDGKLEKAIAKDLLQTQFRNFAEPCEDSRRSWPSAKLEESTLSRHWI

SEQ ID NO: 19096 - protein, 10 aa, Artificial Sequence
  Synthetic polypeptide
GFQYPNNWLQ

SEQ ID NO: 19097 - protein, 46 aa, Artificial Sequence
  Synthetic polypeptide
RRRQVISAFPTEDFNIQTTGFSESSEEVLRSGKSYCHHCSDFQKFF

SEQ ID NO: 19098 - protein, 37 aa, Artificial Sequence
  Synthetic polypeptide
AQEFETSLGNIGRPHLYKKLPRHNPISQRRRSAWRGL

SEQ ID NO: 19099 - protein, 35 aa, Artificial Sequence
  Synthetic polypeptide
DQPGQHWETPSLQKITQAQPDLPEKEKCLAWTITF

SEQ ID NO: 19100 - protein, 1057 aa, Artificial Sequence
  Synthetic polypeptide
WLKPIIPTLWEAKMSRSFEPRSLRPAWATLGDPISTKNYPGTTRSPREGEVPGVDYNFLTVKEFLDLEQSGTLLEVGTYEGNYYGTPKPPSQPVSGKVITTDALHSLQSGSKQSTPKRTKSYNDMQNAGIVHAENEEEDDVPEMNSSFTADSGEQEEHTLQETALPPVNSSIIAAPITDPSQKFPQYLPLSAEDNLGPLPENWEMAYTENGEVYFIDHNTKTTSWLDPRCLNKQQKPLEECEDDEGVHTEELDSELELPAGWEKIEDPVYGIYYVDHINRKTQYENPVLEAKRKKQLEQQQQQQQQQQQQQQQQQQQQTEEWTEDHSALVPPVIPNHPPSNPEPAREVPLQGKPFFTRNPSELKGKFIHTKLRKSSRGFGFTVVGGDEPDEFLQIKSLVLDGPAALDGKMETGDVIVSVNDTCVLGHTHAQVVKIFQSIPIGASVDLELCRGYPLPFDPDDPNTSLVTSVAILDKEPIIVNGQETYDSPASHSSKTGKVNGMKDARPSSPADVASNSSHGYPNDTVSLASSIATQPELITVHIVKGPMGFGFTIADSPGGGGQRVKQIVDSPRCRGLKEGDLIVEVNKKNVQALTHNQVVDMLVECPKGSEVTLLVQRGGLPVPKKSPKSQPLERKDSQNSSQHSVSSHRSLHTASPSHSTQVLPEFPPAEAQAPDQTDSSGQKKPDPFKIWAQSRSMYENRLPDYQEQDIFLWRKETGFGFRILGGNEPGEPIYIGHIVPLGAADTDGRLRSGDELICVDGTPVIGKSHQLVVQLMQQAAKQGHVNLTVRRKVVFAVPKTENEVPSPASSHHSSNQPASLTEEKRTPQGSQNSLNTVSSGSGSTSGIGSGGGGGSGVVSTVVQPYDVEIRRGENEGFGFVIVSSVSRPEAGTTFESSNATLLTNAEKIATITTTHTPSQQGTQETRNTTKPKQESQFEFKAPQATQEQDFYTVELERGAKGFGFSLRGGREYNMDLYVLRLAEDGPAERCGKMRIGDEILEINGETTKNMKHSRAIELIKNGGRRVRLFLKRGDGSVPEYGGSNYENIPSFPGMTP

SEQ ID NO: 19101 - protein, 1359 aa, Artificial Sequence
  Synthetic polypeptide
WLKPIIPTLWEAKMSRSFEPRSLRPAWATLGDPISTKNYPGTTRSPREGEVPGVDYNFLTVKEFLDLEQSGTLLEVGTYEGNYYGTPKPPSQPVSGKVITTDALHSLQSGSKQSTPKRTKSYNDMQNAGIVHAENEEEDDVPEMNSSFTADSGEQEEHTLQETALPPVNSSIIAAPITDPSQKFPQYLPLSAEDNLGPLPENWEMAYTENGEVYFIDHNTKTTSWLDPRCLNKQQKPLEECEDDEGVHTEELDSELELPAGWEKIEDPVYGIYYVDHINRKTQYENPVLEAKRKKQLEQQQQQQQQQQQQQQQQQQQQTEEWTEDHSALVPPVIPNHPPSNPEPAREVPLQGKPFFTRNPSELKGKFIHTKLRKSSRGFGFTVVGGDEPDEFLQIKSLVLDGPAALDGKMETGDVIVSVNDTCVLGHTHAQVVKIFQSIPIGASVDLELCRGYPLPFDPDDPNTSLVTSVAILDKEPIIVNGQETYDSPASHSSKTGKVNGMKDARPSSPADVASNSSHGYPNDTVSLASSIATQPELITVHIVKGPMGFGFTIADSPGGGGQRVKQIVDSPRCRGLKEGDLIVEVNKKNVQALTHNQVVDMLVECPKGSEVTLLVQRGGLPVPKKSPKSQPLERKDSQNSSQHSVSSHRSLHTASPSHSTQVLPEFPPAEAQAPDQTDSSGQKKPDPFKIWAQSRSMYENRLPDYQEQDIFLWRKETGFGFRILGGNEPGEPIYIGHIVPLGAADTDGRLRSGDELICVDGTPVIGKSHQLVVQLMQQAAKQGHVNLTVRRKVVFAVPKTENEVPSPASSHHSSNQPASLTEEKRTPQGSQNSLNTVSSGSGSTSGIGSGGGGGSGVVSTVVQPYDVEIRRGENEGFGFVIVSSVSRPEAGTTFGNACVAMPHKIGRIIEGSPADRCGKLKVGDRILAVNGCSITNKSHSDIVNLIKEAGNTVTLRIIPGDESSNATLLTNAEKIATITTTHTPSQQGTQETRNTTKPKQESQFEFKAPQATQEQDFYTVELERGAKGFGFSLRGGREYNMDLYVLRLAEDGPAERCGKMRIGDEILEINGETTKNMKHSRAIELIKNGGRRVRLFLKRGDGSVPEYDPSSDRHGPATGPQGVPEVRAGPDRRQHPSLESSYPPDLHKSSPHGEKRAHARDPKGSREYSRQPNEHHTWNGTSRKPDSGACRPKDRAPEGRRDAQAERAAAANGPKRRSPEKRREGTRSADNTLERREKHEKRRDVSPERRRERSPTRRRDGSPSRRRRSLERLLEQRRSPERRRGGSPERRAKSTDRRRARSPERRRERSLDKRNREDRASHREREEANLKQDAGRSSRHPPEQRRRPYKECSTDLSI

SEQ ID NO: 19102 - protein, 1153 aa, Artificial Sequence
  Synthetic polypeptide
WLKPIIPTLWEAKMSRSFEPRSLRPAWATLGDPISTKNYPGTTRSPREGEVPGVDYNFLTVKEFLDLEQSGTLLEVGTYEGNYYGTPKPPSQPVSGKVITTDALHSLQSGSKQSTPKRTKSYNDMQNAGIVHAENEEEDDVPEMNSSFTADSGEQEEHTLQETALPPVNSSIIAAPITDPSQKFPQYLPLSAEDNLGPLPENWEMAYTENGEVYFIDHNTKTTSWLDPRCLNKQQKPLEECEDDEGVHTEELDSELELPAGWEKIEDPVYGIYYVDHINRKTQYENPVLEAKRKKQLEQQQQQQQQQQQQQQQQQQQQTEEWTEDHSALVPPVIPNHPPSNPEPAREVPLQGKPFFTRNPSELKGKFIHTKLRKSSRGFGFTVVGGDEPDEFLQIKSLVLDGPAALDGKMETGDVIVSVNDTCVLGHTHAQVVKIFQSIPIGASVDLELCRGYPLPFDPDDPNTSLVTSVAILDKEPIIVNGQETYDSPASHSSKTGKVNGMKDARPSSPADVASNSSHGYPNDTVSLASSIATQPELITVHIVKGPMGFGFTIADSPGGGGQRVKQIVDSPRCRGLKEGDLIVEVNKKNVQALTHNQVVDMLVECPKGSEVTLLVQRGGLPVPKKSPKSQPLERKDSQNSSQHSVSSHRSLHTASPSHSTQVLPEFPPAEAQAPDQTDSSGQKKPDPFKIWAQSRSMYENRPMSPSPASGLSKGEREREINSTNFGECPIPDYQEQDIFLWRKETGFGFRILGGNEPGEPIYIGHIVPLGAADTDGRLRSGDELICVDGTPVIGKSHQLVVQLMQQAAKQGHVNLTVRRKVVFAVPKTENEVPSPASSHHSSNQPASLTEEKRTPQGSQNSLNTVSSGSGSTSGIGSGGGGGSGVVSTVVQPYDVEIRRGENEGFGFVIVSSVSRPEAGTTFAGNACVAMPHKIGRIIEGSPADRCGKLKVGDRILAVNGCSITNKSHSDIVNLIKEAGNTVTLRIIPGDESSNATLLTNAEKIATITTTHTPSQQGTQETRNTTKPKQESQFEFKAPQATQEQDFYTVELERGAKGFGFSLRGGREYNMDLYVLRLAEDGPAERCGKMRIGDEILEINGETTKNMKHSRAIELIKNGGRRVRLFLKRGDGSVPEYGGSNYENIPSFPGMTP

SEQ ID NO: 19103 - protein, 1184 aa, Artificial Sequence
  Synthetic polypeptide
WLKPIIPTLWEAKMSRSFEPRSLRPAWATLGDPISTKNYPGTTRSPREGEVPGVDYNFLTVKEFLDLEQSGTLLEVGTYEGNYYGTPKPPSQPVSGKVITTDALHSLQSGSKQSTPKRTKSYNDMQNAGIVHAENEEEDDVPEMNSSFTADSGEQEEHTLQETALPPVNSSIIAAPITDPSQKFPQYLPLSAEDNLGPLPENWEMAYTENGEVYFIDHNTKTTSWLDPRCLNKQQKPLEECEDDEGVHTEELDSELELPAGWEKIEDPVYGIYYVDHINRKTQYENPVLEAKRKKQLEQQQQQQQQQQQQQQQQQQQQTEEWTEDHSALVPPVIPNHPPSNPEPAREVPLQGKPFFTRNPSELKGKFIHTKLRKSSRGFGFTVVGGDEPDEFLQIKSLVLDGPAALDGKMETGDVIVSVNDTCVLGHTHAQVVKIFQSIPIGASVDLELCRGYPLPFDPDDPNTSLVTSVAILDKEPIIVNGQETYDSPASHSSKTGKVNGMKDARPSSPADVASNSSHGYPNDTVSLASSIATQPELITVHIVKGPMGFGFTIADSPGGGGQRVKQIVDSPRCRGLKEGDLIVEVNKKNVQALTHNQVVDMLVECPKGSEVTLLVQRGGLPVPKKSPKSQPLERKDSQNSSQHSVSSHRSLHTASPSHSTQVLPEFPPAEAQAPDQTDSSGQKKPDPFKIWAQSRSMYENRPMSPSPASGLSKGEREREINSTNFGECPIPDYQEQDIFLWRKETGFGFRILGGNEPGEPIYIGHIVPLGAADTDGRLRSGDELICVDGTPVIGKSHQLVVQLMQQAAKQGHVNLTVRRKVVFAVPKTENEVPSPASSHHSSNQPASLTEEKRTPQGSQNSLNTVSSGSGSTSGIGSGGGGGSGVVSTVVQPYDVEIRRGENEGFGFVIVSSVSRPEAGTTFGNACVAMPHKIGRIIEGSPADRCGKLKVGDRILAVNGCSITNKSHSDIVNLIKEAGNTVTLRIIPGDESSNATLLTNAEKIATITTTHTPSQQGTQETRNTTKPKQESQFEFKAPQATQEQDFYTVELERGAKGFGFSLRGGREYNMDLYVLRLAEDGPAERCGKMRIGDEILEINGETTKNMKHSRAIELIKNGGRRVRLFLKRGDGSVPEYAMIPPNIAACMRNEKLGEACFYLMGHNQTTTPAATATAPPPVHKVFRK

SEQ ID NO: 19104 - protein, 1152 aa, Artificial Sequence
  Synthetic polypeptide
WLKPIIPTLWEAKMSRSFEPRSLRPAWATLGDPISTKNYPGTTRSPREGEVPGVDYNFLTVKEFLDLEQSGTLLEVGTYEGNYYGTPKPPSQPVSGKVITTDALHSLQSGSKQSTPKRTKSYNDMQNAGIVHAENEEEDDVPEMNSSFTADSGEQEEHTLQETALPPVNSSIIAAPITDPSQKFPQYLPLSAEDNLGPLPENWEMAYTENGEVYFIDHNTKTTSWLDPRCLNKQQKPLEECEDDEGVHTEELDSELELPAGWEKIEDPVYGIYYVDHINRKTQYENPVLEAKRKKQLEQQQQQQQQQQQQQQQQQQQQTEEWTEDHSALVPPVIPNHPPSNPEPAREVPLQGKPFFTRNPSELKGKFIHTKLRKSSRGFGFTVVGGDEPDEFLQIKSLVLDGPAALDGKMETGDVIVSVNDTCVLGHTHAQVVKIFQSIPIGASVDLELCRGYPLPFDPDDPNTSLVTSVAILDKEPIIVNGQETYDSPASHSSKTGKVNGMKDARPSSPADVASNSSHGYPNDTVSLASSIATQPELITVHIVKGPMGFGFTIADSPGGGGQRVKQIVDSPRCRGLKEGDLIVEVNKKNVQALTHNQVVDMLVECPKGSEVTLLVQRGGLPVPKKSPKSQPLERKDSQNSSQHSVSSHRSLHTASPSHSTQVLPEFPPAEAQAPDQTDSSGQKKPDPFKIWAQSRSMYENRPMSPSPASGLSKGEREREINSTNFGECPIPDYQEQDIFLWRKETGFGFRILGGNEPGEPIYIGHIVPLGAADTDGRLRSGDELICVDGTPVIGKSHQLVVQLMQQAAKQGHVNLTVRRKVVFAVPKTENEVPSPASSHHSSNQPASLTEEKRTPQGSQNSLNTVSSGSGSTSGIGSGGGGGSGVVSTVVQPYDVEIRRGENEGFGFVIVSSVSRPEAGTTFGNACVAMPHKIGRIIEGSPADRCGKLKVGDRILAVNGCSITNKSHSDIVNLIKEAGNTVTLRIIPGDESSNATLLTNAEKIATITTTHTPSQQGTQETRNTTKPKQESQFEFKAPQATQEQDFYTVELERGAKGFGFSLRGGREYNMDLYVLRLAEDGPAERCGKMRIGDEILEINGETTKNMKHSRAIELIKNGGRRVRLFLKRGDGSVPEYGGSNYENIPSFPGMTP

SEQ ID NO: 19105 - protein, 73 aa, Artificial Sequence
  Synthetic polypeptide
AKGLDFSTSVNLPRSHGWQTRGLILATTTMTAPSAAARQAMETATATSLPTVAQGSLLLTPPLSSSSQTSATT

SEQ ID NO: 19106 - protein, 57 aa, Artificial Sequence
  Synthetic polypeptide
AKGLDFSTSVNLPRSHGWQTRGLILATTTMTAPSAAARQAMETATATSLPTVAQLIV

SEQ ID NO: 19107 - protein, 17 aa, Artificial Sequence
  Synthetic polypeptide
EQCLTHYKQRAWTSQHQ

SEQ ID NO: 19108 - protein, 700 aa, Artificial Sequence
  Synthetic polypeptide
NNASHIISKGPGLLNISEPAAQPWLADTWPNTGNNHNDCSISCCTAGNGNSDSNLTTYSRPADCIANYNNQLDNKQTNLMLPESTVYGDVDLSNKINEMKTFNSPNLKDGRFVNPSGQPTPYATTQLIQSNLSNNMNNGSGDSGEKHWKPLGQQKQEVAPVQYNIVEQNKLNKDYRANDTVPPTIPYNQSYDQNTGGSYNSSDRGSSTSGSQGHKKGARTPKVPKQGGMNWADLLPPPPAHPPPHSNSEEYNISVDESYDQEMPCPVPPARMYLQQDELEEEEDERGPTPPVRGAASSPAAVSYSHQSTATLTPSPQEELQPMLQDCPEETGHMQHQPDRRRQPVSPPPPPRPISPPHTYGYISGPLVSDMDTDAPEEEEDEADMEVAKMQTRRLLLRGLEQTPASSVGDLESSVTGSMINGWGSASEEDNISSGRSSVSSSDGSFFTDADFAQAVAAAAEYAGLKVARRQMQDAAGRRHFHASQCPRPTSPVSTDSNMSAAVMQKTRPAKKLKHQPGHLRRETYTDDLPPPPVPPPAIKSPTAQSKTQLEVRPVVVPKLPSMDARTDRSSDRKGSSYKGREVLDGRQVVDMRTNPGDPREAQEQQNDGKGRGNKAAKRDLPPAKTHLIQEDILPYCRPTFPTSNNPRDPSSSSSMSSRGSGSRQREQANVGRRNIAEMQVLGGYERGEDNNEELEETES

SEQ ID NO: 19109 - protein, 645 aa, Artificial Sequence
  Synthetic polypeptide
NNASHIISKGPGLLNISEPAAQPWLADTWPNTGNNHNDCSISCCTAGNGNSDSNLTTYSRPGQPTPYATTQLIQSNLSNNMNNGSGDSGEKHWKPLGQQKQEVAPVQYNIVEQNKLNKDYRANDTVPPTIPYNQSYDQNTGGSYNSSDRGSSTSGSQGHKKGARTPKVPKQGGMNWADLLPPPPAHPPPHSNSEEYNISVDESYDQEMPCPVPPARMYLQQDELEEEEDERGPTPPVRGAASSPAAVSYSHQSTATLTPSPQEELQPMLQDCPEETGHMQHQPDRRRQPVSPPPPPRPISPPHTYGYISGPLVSDMDTDAPEEEEDEADMEVAKMQTRRLLLRGLEQTPASSVGDLESSVTGSMINGWGSASEEDNISSGRSSVSSSDGSFFTDADFAQAVAAAAEYAGLKVARRQMQDAAGRRHFHASQCPRPTSPVSTDSNMSAAVMQKTRPAKKLKHQPGHLRRETYTDDLPPPPVPPPAIKSPTAQSKTQLEVRPVVVPKLPSMDARTDRSSDRKGSSYKGREVLDGRQVVDMRTNPGDPREAQEQQNDGKGRGNKAAKRDLPPAKTHLIQEDILPYCRPTFPTSNNPRDPSSSSSMSSRGSGSRQREQANVGRRNIAEMQVLGGYERGEDNNEELEETES

SEQ ID NO: 19110 - protein, 8 aa, Artificial Sequence
  Synthetic polypeptide
LKNLHILL

SEQ ID NO: 19111 - protein, 10 aa, Artificial Sequence
  Synthetic polypeptide
RTSTFCCETP

SEQ ID NO: 19112 - protein, 1316 aa, Artificial Sequence; identical to SEQ ID NO: 1478
  Synthetic polypeptide

SEQ ID NO: 19113 - protein, 1307 aa, Artificial Sequence; identical to SEQ ID NO: 1481
  Synthetic polypeptide

SEQ ID NO: 19114 - protein, 1252 aa, Artificial Sequence; identical to SEQ ID NO: 1499
  Synthetic polypeptide

SEQ ID NO: 19115 - protein, 1353 aa, Artificial Sequence
  Synthetic polypeptide
GLPSHVELYEIRDDHTLKIRKVTAGDMGSYTCVAENMVGKAEASATLTVQEPPHFVVKPRDQVVALGRTVTFQCEATGNPQPAIFWRREGSQNLLFSYQPPQSSSRFSVSQTGDLTITNVQRSDVGYYICQTLNVAGSIITKAYLEVTDVIADRPPPVIRQGPVNQTVAVDGTFVLSCVATGSPVPTILWRKDGVLVSTQDSRIKQLENGVLQIRYAKLGDTGRYTCIASTPSGEATWSAYIEVQEFGVPVQPPRPTDPNLIPSAPSKPEVTDVSRNTVTLSWQPNLNSGATPTSYIIEAFSHASGSSWQTVAENVKTETSAIKGLKPNAIYLFLVRAANAYGISDPSQISDPVKTQDVLPTSQGVDHKQVQRELGNAVLHLHNPTVLSSSSIEVHWTVDQQSQYIQGYKILYRPSGANHGESDWLVFEVRTPAKNSVVIPDLRKGVNYEIKARPFFNEFQGADSEIKFAKTLEEAPSAPPQGVTVSKNDGNGTAILVSWQPPPEDTQNGMVQEYKVWCLGNETRYHINKTVDGSTFSVVIPFLVPGIRYSVEVAASTGAGSGVKSEPQFIQLDAHGNPVSPEDQVSLAQQISDVVKQPAFIAGIGAACWIILMVFSIWLYRHRKKRNGLTSTYAGIRKVPSFTFTPTVTYQRGGEAVSSGGRPGLLNISEPAAQPWLADTWPNTGNNHNDCSISCCTAGNGNSDSNLTTYSRPADCIANYNNQLDNKQTNLMLPESTVYGDVDLSNKINEMKTFNSPNLKDGRFVNPSGQPTPYATTQLIQSNLSNNMNNGSGDSGEKHWKPLGQQKQEVAPVQYNIVEQNKLNKDYRANDTVPPTIPYNQSYDQNTGGSYNSSDRGSSTSGSQGHKKGARTPKVPKQGGMNWADLLPPPPAHPPPHSNSEEYNISVDESYDQEMPCPVPPARMYLQQDELEEEEDERGPTPPVRGAASSPAAVSYSHQSTATLTPSPQEELQPMLQDCPEETGHMQHQPDRRRQPVSPPPPPRPISPPHTYGYISGPLVSDMDTDAPEEEEDEADMEVAKMQTRRLLLRGLEQTPASSVGDLESSVTGSMINGWGSASEEDNISSGRSSVSSSDGSFFTDADFAQAVAAAAEYAGLKVARRQMQDAAGRRHFHASQCPRPTSPVSTDSNMSAAVMQKTRPAKKLKHQPGHLRRETYTDDLPPPPVPPPAIKSPTAQSKTQLEVRPVVVPKLPSMDARTDRSSDRKGSSYKGREVLDGRQVVDMRTNPGDPREAQEQQNDGKGRGNKAAKRDLPPAKTHLIQEDILPYCRPTFPTSNNPRDPSSSSSMSSRGSGSRQREQANVGRRNIAEMQVLGGYERGEDNNEELEETES

SEQ ID NO: 19116 - protein, 1347 aa, Artificial Sequence
  Synthetic polypeptide
GLPSHVELYEIRDDHTLKIRKVTAGDMGSYTCVAENMVGKAEASATLTVQVGSEPPHFVVKPRDQVVALGRTVTFQCEATGNPQPAIFWRREGSQNLLFSYQPPQSSSRFSVSQTGDLTITNVQRSDVGYYICQTLNVAGSIITKAYLEVTDVIADRPPPVIRQGPVNQTVAVDGTFVLSCVATGSPVPTILWRKDGVLVSTQDSRIKQLENGVLQIRYAKLGDTGRYTCIASTPSGEATWSAYIEVQEFGVPVQPPRPTDPNLIPSAPSKPEVTDVSRNTVTLSWQPNLNSGATPTSYIIEAFSHASGSSWQTVAENVKTETSAIKGLKPNAIYLFLVRAANAYGISDPSQISDPVKTQDVLPTSQGVDHKQVQRELGNAVLHLHNPTVLSSSSIEVHWTVDQQSQYIQGYKILYRPSGANHGESDWLVFEVRTPAKNSVVIPDLRKGVNYEIKARPFFNEFQGADSEIKFAKTLEEAPSAPPQGVTVSKNDGNGTAILVSWQPPPEDTQNGMVQEYKVWCLGNETRYHINKTVDGSTFSVVIPFLVPGIRYSVEVAASTGAGSGVKSEPQFIQLDAHGNPVSPEDQVSLAQQISDVVKQPAFIAGIGAACWIILMVFSIWLYRHRKKRNGLTSTYAGIRKVTYQRGGEAVSSGGRPGLLNISEPAAQPWLADTWPNTGNNHNDCSISCCTAGNGNSDSNLTTYSRPADCIANYNNQLDNKQTNLMLPESTVYGDVDLSNKINEMKTFNSPNLKDGRFVNPSGQPTPYATTQLIQSNLSNNMNNGSGDSGEKHWKPLGQQKQEVAPVQYNIVEQNKLNKDYRANDTVPPTIPYNQSYDQNTGGSYNSSDRGSSTSGSQGHKKGARTPKVPKQGGMNWADLLPPPPAHPPPHSNSEEYNISVDESYDQEMPCPVPPARMYLQQDELEEEEDERGPTPPVRGAASSPAAVSYSHQSTATLTPSPQEELQPMLQDCPEETGHMQHQPDRRRQPVSPPPPPRPISPPHTYGYISGPLVSDMDTDAPEEEEDEADMEVAKMQTRRLLLRGLEQTPASSVGDLESSVTGSMINGWGSASEEDNISSGRSSVSSSDGSFFTDADFAQAVAAAAEYAGLKVARRQMQDAAGRRHFHASQCPRPTSPVSTDSNMSAAVMQKTRPAKKLKHQPGHLRRETYTDDLPPPPVPPPAIKSPTAQSKTQLEVRPVVVPKLPSMDARTDRSSDRKGSSYKGREVLDGRQVVDMRTNPGDPREAQEQQNDGKGRGNKAAKRDLPPAKTHLIQEDILPYCRPTFPTSNNPRDPSSSSSMSSRGSGSRQREQANVGRRNIAEMQVLGGYERGEDNNEELEETES

SEQ ID NO: 19117 - protein, 1292 aa, Artificial Sequence
  Synthetic polypeptide
GLPSHVELYEIRDDHTLKIRKVTAGDMGSYTCVAENMVGKAEASATLTVQVGSEPPHFVVKPRDQVVALGRTVTFQCEATGNPQPAIFWRREGSQNLLFSYQPPQSSSRFSVSQTGDLTITNVQRSDVGYYICQTLNVAGSIITKAYLEVTDVIADRPPPVIRQGPVNQTVAVDGTFVLSCVATGSPVPTILWRKDGVLVSTQDSRIKQLENGVLQIRYAKLGDTGRYTCIASTPSGEATWSAYIEVQEFGVPVQPPRPTDPNLIPSAPSKPEVTDVSRNTVTLSWQPNLNSGATPTSYIIEAFSHASGSSWQTVAENVKTETSAIKGLKPNAIYLFLVRAANAYGISDPSQISDPVKTQDVLPTSQGVDHKQVQRELGNAVLHLHNPTVLSSSSIEVHWTVDQQSQYIQGYKILYRPSGANHGESDWLVFEVRTPAKNSVVIPDLRKGVNYEIKARPFFNEFQGADSEIKFAKTLEEAPSAPPQGVTVSKNDGNGTAILVSWQPPPEDTQNGMVQEYKVWCLGNETRYHINKTVDGSTFSVVIPFLVPGIRYSVEVAASTGAGSGVKSEPQFIQLDAHGNPVSPEDQVSLAQQISDVVKQPAFIAGIGAACWIILMVFSIWLYRHRKKRNGLTSTYAGIRKVTYQRGGEAVSSGGRPGLLNISEPAAQPWLADTWPNTGNNHNDCSISCCTAGNGNSDSNLTTYSRPGQPTPYATTQLIQSNLSNNMNNGSGDSGEKHWKPLGQQKQEVAPVQYNIVEQNKLNKDYRANDTVPPTIPYNQSYDQNTGGSYNSSDRGSSTSGSQGHKKGARTPKVPKQGGMNWADLLPPPPAHPPPHSNSEEYNISVDESYDQEMPCPVPPARMYLQQDELEEEEDERGPTPPVRGAASSPAAVSYSHQSTATLTPSPQEELQPMLQDCPEETGHMQHQPDRRRQPVSPPPPPRPISPPHTYGYISGPLVSDMDTDAPEEEEDEADMEVAKMQTRRLLLRGLEQTPASSVGDLESSVTGSMINGWGSASEEDNISSGRSSVSSSDGSFFTDADFAQAVAAAAEYAGLKVARRQMQDAAGRRHFHASQCPRPTSPVSTDSNMSAAVMQKTRPAKKLKHQPGHLRRETYTDDLPPPPVPPPAIKSPTAQSKTQLEVRPVVVPKLPSMDARTDRSSDRKGSSYKGREVLDGRQVVDMRTNPGDPREAQEQQNDGKGRGNKAAKRDLPPAKTHLIQEDILPYCRPTFPTSNNPRDPSSSSSMSSRGSGSRQREQANVGRRNIAEMQVLGGYERGEDNNEELEETES

SEQ ID NO: 19118 - protein, 28 aa, Artificial Sequence
  Synthetic polypeptide
RGAFRHDCKFPEVSPAMWNYMKSEMIIP

SEQ ID NO: 19119 - protein, 47 aa, Artificial Sequence
  Synthetic polypeptide
VLMRSDGFISVWHFPCWHSFSLLSPCEEVPSAMIVSFLRSPQPCGTI

SEQ ID NO: 19120 - protein, 14 aa, Artificial Sequence
  Synthetic polypeptide
AMIMPQYSSLRDRL

SEQ ID NO: 19121 - protein, 326 aa, Artificial Sequence
  Synthetic polypeptide
QTLRDNRIELVRASWHELSISVSDVSLSDEGQYTCSLFTMPVKTSKAYLTVLGVPEKPQISGFSSPVMEGDLMQLTCKTSGSKPAADIRWFKNDKEIKDVKYLKEEDANRKTFTVSSTLDFRVDRSDDGVAVICRVDHESLNATPQVAMQVLEIHYTPSVKIIPSTPFPQEGQPLILTCESKGKPLPEPVLWTKDGGELPDPDRMVVSGRELNILFLNKTDNGTYRCEATNTIGQSSAEYVLIVHDPNALAGQNGPDHALIGGIVAVVVFVTLCSIFLLGRYLARHKGTYLTNEAKGAEDAPDADTAIINAEGSQVNAEEKKEYFI

SEQ ID NO: 19122 - protein, 366 aa, Artificial Sequence
  Synthetic polypeptide
QTLRDNRIELVRASWHELSISVSDVSLSDEGQYTCSLFTMPVKTSKAYLTVLGVPEKPQISGFSSPVMEGDLMQLTCKTSGSKPAADIRWFKNDKEIKDVKYLKEEDANRKTFTVSSTLDFRVDRSDDGVAVICRVDHESLNATPQVAMQVLEIHYTPSVKIIPSTPFPQEGQPLILTCESKGKPLPEPVLWTKDGGELPDPDRMVVSGRELNILFLNKTDNGTYRCEATNTIGQSSAEYVLIVHDVPNTLLPTTIIPSLTTATVTTTVAITTSPTTSATTSSIRDPNALAGQNGPDHALIGGIVAVVVFVTLCSIFLLGRYLARHKGTYLTNEAKGAEDAPDADTAIINAEGSQVNAEEKKEYFI

SEQ ID NO: 19123 - protein, 15 aa, Artificial Sequence
  Synthetic polypeptide
SCHSTPVCVTDFKGQ

SEQ ID NO: 19124 - protein, 68 aa, Artificial Sequence
  Synthetic polypeptide
AKIEPLHSSLATGFESTVQGVQMMPGQMWRTSRRRTVLFEVVTRIFLIRSEAMTSSCFDTCQSNTSVT

SEQ ID NO: 19125 - protein, 20 aa, Artificial Sequence
  Synthetic polypeptide
AKIEPLHSSLATGFESTVQV

SEQ ID NO: 19126 - protein, 98 aa, Artificial Sequence
  Synthetic polypeptide
AKIEPLHSSLATGFESTVQVSKLQDLIHRSKMARCRGRFVCPVILFKGKGVQMMPGQMWRTSRRRTVLFEVVTRIFLIRSEAMTSSCFDTCQSNTSVT

SEQ ID NO: 19127 - protein, 448 aa, Artificial Sequence
  Synthetic polypeptide
AKIEPLHSSLATGFESTVQVSKLQDLIHRSKMARCRGRFVCPVILFKGKHICRSATLAGWGELYGRSGYNYFFSGGADDAWADVEDVTEEDCALRSGDTHLFDKVRGYDIKLLRYLSVKYICDLMVENKKVKFGMNVTSSEKVDKAQRYADFTLLSIPYPGCEFFKEYKDRDYMAEGLIFNWKQDYVDAPLSIPDFLTHSLNIDWSQYQCWDLVQQTQNYLKLLLSLVNSDDDSGLLVHCISGWDRTPLFISLLRLSLWADGLIHTSLKPTEILYLTVAYDWFLFGHMLVDRLSKGEEIFFFCFNFLKHITSEEFSALKTQRRKSLPARDGGFTLEDICMLRRKDRGSTTSLGSDFSLVMESSPGATGSFTYEAVELVPAGAPTQAAWLAALSDRETRLQEVRSAFLAAYSSTVGLRAVAPSPSGAIGGLLEQFARGVGLRSISSNAL

SEQ ID NO: 19128 - protein, 508 aa, Artificial Sequence
  Synthetic polypeptide
AKIEPLHSSLATGFESTVQVSKLQDLIHRSKMARCRGRFVCPVILFKGKHICRSATLAGWGELYGRSGYNYFFSGGADDAWADVEDVTEEDCALRSGDTHLFDKVRGYDIKLLRYLSVKYICDLMVENKKVKFGMNVTSSEKVDKAQRYADFTLLSIPYPGCEFFKEYKDRDYMAEGLIFNWKQDYVDAPLSIPDFLTHSLNIDWSQYQCWDLVQQTQNYLKLLLSLVNSDDDSGLLVHCISGWDRTPLFISLLRLSLWADGLIHTSLKPTEILYLTVAYDWFLFGHMLVDRLSKGEEIFFFCFNFLKHITSEEFSALKTQRRKSLPARDGGFTLEDICMLRRKDRGSTTSLGSDFSLVMESSPGATGSFTYEAVELVPAGAPTQAAWRKSHSSSPQSVLWNRPQPSEDRLPSQQGLAEARSSSSSSSNHSDNFFRMGSSPLEVPKPRLAALSDRETRLQEVRSAFLAAYSSTVGLRAVAPSPSGAIGGLLEQFARGVGLRSISSNAL

SEQ ID NO: 19129 - protein, 560 aa, Artificial Sequence
  Synthetic polypeptide
AKIEPLHSSLATGFESTVQVSKLQDLIHRSKMARCRGRFVCPVILFKGKHICRSATLAGWGELYGRSGYNYFFSGGADDAWADVEDVTEEDCALRSGDTHLFDKVRGYDIKLLRYLSVKYICDLMVENKKVKFGMNVTSSEKVDKAQRYADFTLLSIPYPGCEFFKEYKDRDYMAEGLIFNWKQDYVDAPLSIPDFLTHSLNIDWSQYQCWDLVQQTQNYLKLLLSLVNSDDDSGLLVHCISGWDRTPLFISLLRLSLWADGLIHTSLKPTEILYLTVAYDWFLFGHMLVDRLSKGEEIFFFCFNFLKHITSEEFSALKTQRRKSLPARDGGFTLEDICMLRRKDRGSTTSLGSDFSLVMESSPGATGSFTYEAVELVPAGAPTQAAWRKSHSSSPQSVLWNRPQPSEDRLPSQQGLAEARSSSSSSSNHSDNFFRMGSSPLEVPKPRSVDHPLPGSSLSTDYGSWQMVTGCGSIQERAVLHTDSSLPFSFPDELPNSCLLAALSDRETRLQEVRSAFLAAYSSTVGLRAVAPSPSGAIGGLLEQFARGVGLRSISSNAL

SEQ ID NO: 19130 - protein, 41 aa, Artificial Sequence
  Synthetic polypeptide
SQLLGRLRQENHLNPGGGDCTEPRSNHCIPAWRQGLRVPYR

SEQ ID NO: 19131 - protein, 44 aa, Artificial Sequence
  Synthetic polypeptide
SQLLGRLRQENHLNPGGGDCTEPRSNHCIPAWRQGLRVPYRGCR

SEQ ID NO: 19132 - protein, 22 aa, Artificial Sequence
  Synthetic polypeptide
TQEAETALSQDRTTAFQPGDRV

SEQ ID NO: 19133 - protein, 72 aa, Artificial Sequence
  Synthetic polypeptide
GRAPCLTPVISTLWEAKASGSRGGADDAWADVEDVTEEDCALRSGDTHLFDKVRGYDIKLLRYLSVKYICDL

SEQ ID NO: 19134 - protein, 396 aa, Artificial Sequence
  Synthetic polypeptide
GRAPCLTPVISTLWEAKASGSRGGADDAWADVEDVTEEDCALRSGDTHLFDKVRGYDIKLLRYLSVKYICDLMVENKKVKFGMNVTSSEKVDKAQRYADFTLLSIPYPGCEFFKEYKDRDYMAEGLIFNWKQDYVDAPLSIPDFLTHSLNIDWSQYQCWDLVQQTQNYLKLLLSLVNSDDDSGLLVHCISGWDRTPLFISLLRLSLWADGLIHTSLKPTEILYLTVAYDWFLFGHMLVDRLSKGEEIFFFCFNFLKHITSEEFSALKTQRRKSLPARDGGFTLEDICMLRRKDRGSTTSLGSDFSLVMESSPGATGSFTYEAVELVPAGAPTQAAWLAALSDRETRLQEVRSAFLAAYSSTVGLRAVAPSPSGAIGGLLEQFARGVGLRSISSNAL

SEQ ID NO: 19135 - protein, 456 aa, Artificial Sequence
  Synthetic polypeptide
GRAPCLTPVISTLWEAKASGSRGGADDAWADVEDVTEEDCALRSGDTHLFDKVRGYDIKLLRYLSVKYICDLMVENKKVKFGMNVTSSEKVDKAQRYADFTLLSIPYPGCEFFKEYKDRDYMAEGLIFNWKQDYVDAPLSIPDFLTHSLNIDWSQYQCWDLVQQTQNYLKLLLSLVNSDDDSGLLVHCISGWDRTPLFISLLRLSLWADGLIHTSLKPTEILYLTVAYDWFLFGHMLVDRLSKGEEIFFFCFNFLKHITSEEFSALKTQRRKSLPARDGGFTLEDICMLRRKDRGSTTSLGSDFSLVMESSPGATGSFTYEAVELVPAGAPTQAAWRKSHSSSPQSVLWNRPQPSEDRLPSQQGLAEARSSSSSSSNHSDNFFRMGSSPLEVPKPRLAALSDRETRLQEVRSAFLAAYSSTVGLRAVAPSPSGAIGGLLEQFARGVGLRSISSNAL

SEQ ID NO: 19136 - protein, 508 aa, Artificial Sequence
  Synthetic polypeptide
GRAPCLTPVISTLWEAKASGSRGGADDAWADVEDVTEEDCALRSGDTHLFDKVRGYDIKLLRYLSVKYICDLMVENKKVKFGMNVTSSEKVDKAQRYADFTLLSIPYPGCEFFKEYKDRDYMAEGLIFNWKQDYVDAPLSIPDFLTHSLNIDWSQYQCWDLVQQTQNYLKLLLSLVNSDDDSGLLVHCISGWDRTPLFISLLRLSLWADGLIHTSLKPTEILYLTVAYDWFLFGHMLVDRLSKGEEIFFFCFNFLKHITSEEFSALKTQRRKSLPARDGGFTLEDICMLRRKDRGSTTSLGSDFSLVMESSPGATGSFTYEAVELVPAGAPTQAAWRKSHSSSPQSVLWNRPQPSEDRLPSQQGLAEARSSSSSSSNHSDNFFRMGSSPLEVPKPRSVDHPLPGSSLSTDYGSWQMVTGCGSIQERAVLHTDSSLPFSFPDELPNSCLLAALSDRETRLQEVRSAFLAAYSSTVGLRAVAPSPSGAIGGLLEQFARGVGLRSISSNAL

SEQ ID NO: 19137 - protein, 25 aa, Artificial Sequence
  Synthetic polypeptide
PGAMPHACNLNTLGGQGERIPRGCR

SEQ ID NO: 19138 - protein, 62 aa, Artificial Sequence
  Synthetic polypeptide
SQHFGRPRRADPEGVQMMPGQMWRTSRRRTVLFEVVTRIFLIRSEAMTSSCFDTCQSNTSVT

SEQ ID NO: 19139 - protein, 82 aa, Artificial Sequence
  Synthetic polypeptide
GRAPCLTPVISTLWEAKASGSRGQEFETILANTGVQMMPGQMWRTSRRRTVLFEVVTRIFLIRSEAMTSSCFDTCQSNTSVT

SEQ ID NO: 19140 - protein, 51 aa, Artificial Sequence
  Synthetic polypeptide
HGGADDAWADVEDVTEEDCALRSGDTHLFDKVRGYDIKLLRYLSVKYICDL

SEQ ID NO: 19141 - protein, 375 aa, Artificial Sequence
  Synthetic polypeptide
HGGADDAWADVEDVTEEDCALRSGDTHLFDKVRGYDIKLLRYLSVKYICDLMVENKKVKFGMNVTSSEKVDKAQRYADFTLLSIPYPGCEFFKEYKDRDYMAEGLIFNWKQDYVDAPLSIPDFLTHSLNIDWSQYQCWDLVQQTQNYLKLLLSLVNSDDDSGLLVHCISGWDRTPLFISLLRLSLWADGLIHTSLKPTEILYLTVAYDWFLFGHMLVDRLSKGEEIFFFCFNFLKHITSEEFSALKTQRRKSLPARDGGFTLEDICMLRRKDRGSTTSLGSDFSLVMESSPGATGSFTYEAVELVPAGAPTQAAWLAALSDRETRLQEVRSAFLAAYSSTVGLRAVAPSPSGAIGGLLEQFARGVGLRSISSNAL

SEQ ID NO: 19142 - protein, 435 aa, Artificial Sequence
  Synthetic polypeptide
HGGADDAWADVEDVTEEDCALRSGDTHLFDKVRGYDIKLLRYLSVKYICDLMVENKKVKFGMNVTSSEKVDKAQRYADFTLLSIPYPGCEFFKEYKDRDYMAEGLIFNWKQDYVDAPLSIPDFLTHSLNIDWSQYQCWDLVQQTQNYLKLLLSLVNSDDDSGLLVHCISGWDRTPLFISLLRLSLWADGLIHTSLKPTEILYLTVAYDWFLFGHMLVDRLSKGEEIFFFCFNFLKHITSEEFSALKTQRRKSLPARDGGFTLEDICMLRRKDRGSTTSLGSDFSLVMESSPGATGSFTYEAVELVPAGAPTQAAWRKSHSSSPQSVLWNRPQPSEDRLPSQQGLAEARSSSSSSSNHSDNFFRMGSSPLEVPKPRLAALSDRETRLQEVRSAFLAAYSSTVGLRAVAPSPSGAIGGLLEQFARGVGLRSISSNAL

SEQ ID NO: 19143 - protein, 487 aa, Artificial Sequence
  Synthetic polypeptide
HGGADDAWADVEDVTEEDCALRSGDTHLFDKVRGYDIKLLRYLSVKYICDLMVENKKVKFGMNVTSSEKVDKAQRYADFTLLSIPYPGCEFFKEYKDRDYMAEGLIFNWKQDYVDAPLSIPDFLTHSLNIDWSQYQCWDLVQQTQNYLKLLLSLVNSDDDSGLLVHCISGWDRTPLFISLLRLSLWADGLIHTSLKPTEILYLTVAYDWFLFGHMLVDRLSKGEEIFFFCFNFLKHITSEEFSALKTQRRKSLPARDGGFTLEDICMLRRKDRGSTTSLGSDFSLVMESSPGATGSFTYEAVELVPAGAPTQAAWRKSHSSSPQSVLWNRPQPSEDRLPSQQGLAEARSSSSSSSNHSDNFFRMGSSPLEVPKPRSVDHPLPGSSLSTDYGSWQMVTGCGSIQERAVLHTDSSLPFSFPDELPNSCLLAALSDRETRLQEVRSAFLAAYSSTVGLRAVAPSPSGAIGGLLEQFARGVGLRSISSNAL

SEQ ID NO: 19144 - protein, 27 aa, Artificial Sequence
  Synthetic polypeptide
SQHFGRPRRADPEVRSSRPSWLTRGCR

SEQ ID NO: 19145 - protein, 344 aa, Artificial Sequence
  Synthetic polypeptide
DVLASRSLSAMIVSFLGPPSHASCAAYGTRTCSEEMEEENATLLTEFVLTGFLHQPDCKIPLFLAFLVIYLITIMGNLGLIVLIWKDPHLHIPMYLFLGSLAFVDASLSSTVTPKMLINFLAKSKMISLSECMVQFFSLVTTVTTECFLLATMAYDRYVAICKALLYPVIMTNELCIQLLVLSFIGGLLHALIHEAFSFRLTFCNSNIIQHFYCDIIPLLKISCTDSSINFLMVFIFAGSVQVFTIGTILISYTIILFTILEKKSIKGIRKAVSTCGAHLLSVSLYYGPLTFKYLGSASPQADDQDMMESLFYTVIVPLLNPMIYSLRNKQVIASFTKMFKSNV

SEQ ID NO: 19146 - protein, 30 aa, Artificial Sequence
  Synthetic polypeptide
VSWGLLAMLPVQPMELGHAVRRWKRKMQHC

SEQ ID NO: 19147 - protein, 76 aa, Artificial Sequence
  Synthetic polypeptide
FPLSLYMAESLSFCQCGMRKSSMCYFQIMQLKILMSSLLPFPLLANTLRMAGAEDAILTMGQRSYVSLWGHSWTIL

SEQ ID NO: 19148 - protein, 104 aa, Artificial Sequence
  Synthetic polypeptide
PWDRGHMSVCGDIHGQFFDLMKLFEVGGSPANTRYLFLGDYVDRGYFSIECVLYLWALKILYPKTLFLLRGNHECRHLTEYFTFKQECKIKYSERVYDACMDAF

SEQ ID NO: 19149 - protein, 119 aa, Artificial Sequence
  Synthetic polypeptide
PWDRGHMSVCGDIHGQFFDLMKLFEVGGSPANTRYLFLGDYVDRGYFSIECVLYLWALKILYPKTLFLLRGNHECRHLTEYFTFKQECKIKYSERVYDACMDAFDCLPLAALMNQQFLC

SEQ ID NO: 19150 - protein, 433 aa, Artificial Sequence
  Synthetic polypeptide
PWDRGHMSVCGDIHGQFFDLMKLFEVGGSPANTRYLFLGDYVDRGYFSIECVLYLWALKILYPKTLFLLRGNHECRHLTEYFTFKQECKIKYSERVYDACMDAFDCLPLAALMNQQFLCVHGGLSPEINTLDDIRKLDRFKEPPAYGPMCDILWSDPLEDFGNEKTQEHFTHNTVRGCSYFYSYPAVCEFLQHNNLLSILRAHEAQDAGYRMYRKSQTTGFPSLITIFSAPNYLDVYNNKAAVLKYENNVMNIRQFNCSPHPYWLPNFMDVFTWSLPFVGEKVTEMLVNVLNICSDDELGSEEDGFDGATAAARKEVIRNKIRAIGKMARVFSVLREESESVLTLKGLTPTGMLPSGVLSGGKQTLQSAIKGFSPQHKITSFEEAKGLDRINERMPPRRDAMPSDANLNSINKALTSETNGTDSNGSNSSNIQ

SEQ ID NO: 19151 - protein, 443 aa, Artificial Sequence
  Synthetic polypeptide
PWDRGHMSVCGDIHGQFFDLMKLFEVGGSPANTRYLFLGDYVDRGYFSIECVLYLWALKILYPKTLFLLRGNHECRHLTEYFTFKQECKIKYSERVYDACMDAFDCLPLAALMNQQFLCVHGGLSPEINTLDDIRKLDRFKEPPAYGPMCDILWSDPLEDFGNEKTQEHFTHNTVRGCSYFYSYPAVCEFLQHNNLLSILRAHEAQDAGYRMYRKSQTTGFPSLITIFSAPNYLDVYNNKAAVLKYENNVMNIRQFNCSPHPYWLPNFMDVFTWSLPFVGEKVTEMLVNVLNICSDDELGSEEDGFDGATAAARKEVIRNKIRAIGKMARVFSVLREESESVLTLKGLTPTGMLPSGVLSGGKQTLQSATVEAIEADEAIKGFSPQHKITSFEEAKGLDRINERMPPRRDAMPSDANLNSINKALTSETNGTDSNGSNSSNIQ

SEQ ID NO: 19152 - protein, 391 aa, Artificial Sequence
  Synthetic polypeptide
PWDRGHMSVCGDIHGQFFDLMKLFEVGGSPANTRYLFLGDYVDRGYFSIECVLYLWALKILYPKTLFLLRGNHECRHLTEYFTFKQECKIKYSERVYDACMDAFDCLPLAALMNQQFLCVHGGLSPEINTLDDIRKLDRFKEPPAYGPMCDILWSDPLEDFGNEKTQEHFTHNTVRGCSYFYSYPAVCEFLQHNNLLSILRAHEAQDAGYRMYRKSQTTGFPSLITIFSAPNYLDVYNNKVTEMLVNVLNICSDDELGSEEDGFDGATAAARKEVIRNKIRAIGKMARVFSVLREESESVLTLKGLTPTGMLPSGVLSGGKQTLQSAIKGFSPQHKITSFEEAKGLDRINERMPPRRDAMPSDANLNSINKALTSETNGTDSNGSNSSNIQ

SEQ ID NO: 19153 - protein, 24 aa, Artificial Sequence
  Synthetic polypeptide
RCHSNHGTEVICQFVGTFMDNSLI

SEQ ID NO: 19154 - protein, 15 aa, Artificial Sequence
  Synthetic polypeptide
CISGMEKKSQVHVPV

SEQ ID NO: 19155 - protein, 65 aa, Artificial Sequence
  Synthetic polypeptide
VSLGWKKRAKFMYLFEGAQTVRNRDDCLDDNALRCPPQFHRWPGDWGFLHLVSPSGTQYFHSNPM

SEQ ID NO: 19156 - protein, 167 aa, Artificial Sequence
  Synthetic polypeptide
YLWDGKKEPSSCTCLKGPKLSEIGTIAWMITLCDALHNFIDGLAIGASCTLSLLQGLSTSIAILCEEFPHELGDFVILLNAGMSTRQALLFNFLSACSCYVGLAFGILVGNNFAPNIIFALAGGMFLYISLADMFPEMNDMLREKIIKWATDDIKSQLHLLWIYTAR

SEQ ID NO: 19157 - protein, 183 aa, Artificial Sequence
  Synthetic polypeptide
YLWDGKKEPSSCTCLKGPKLSEIGTIAWMITLCDALHNFIDGLAIGASCTLSLLQGLSTSIAILCEEFPHELGDFVILLNAGMSTRQALLFNFLSACSCYVGLAFGILVGNNFAPNIIFALAGGMFLYISLADMFPEMNDMLREKVTGRKTDFTFFMIQNAGMLTGFTAILLITLYAGEIELE

SEQ ID NO: 19158 - protein, 42 aa, Artificial Sequence
  Synthetic polypeptide
FQHFERPRQVDHLSPGAEDQSPGVEDQPGQQMEKKSQVHVPV

SEQ ID NO: 19159 - protein, 170 aa, Artificial Sequence
  Synthetic polypeptide
RPAWATDGKKEPSSCTCLKGPKLSEIGTIAWMITLCDALHNFIDGLAIGASCTLSLLQGLSTSIAILCEEFPHELGDFVILLNAGMSTRQALLFNFLSACSCYVGLAFGILVGNNFAPNIIFALAGGMFLYISLADMFPEMNDMLREKIIKWATDDIKSQLHLLWIYTAR

SEQ ID NO: 19160 - protein, 186 aa, Artificial Sequence
  Synthetic polypeptide
RPAWATDGKKEPSSCTCLKGPKLSEIGTIAWMITLCDALHNFIDGLAIGASCTLSLLQGLSTSIAILCEEFPHELGDFVILLNAGMSTRQALLFNFLSACSCYVGLAFGILVGNNFAPNIIFALAGGMFLYISLADMFPEMNDMLREKVTGRKTDFTFFMIQNAGMLTGFTAILLITLYAGEIELE

SEQ ID NO: 19161 - protein, 79 aa, Artificial Sequence
  Synthetic polypeptide
VQELKTRVQELKTSLGNRWKKRAKFMYLFEGAQTVRNRDDCLDDNALRCPPQFHRWPGDWGFLHLVSPSGTQYFHSNPM

SEQ ID NO: 19162 - protein, 7 aa, Artificial Sequence
  Synthetic polypeptide
LREVFNC

SEQ ID NO: 19163 - protein, 25 aa, Artificial Sequence
  Synthetic polypeptide
MMRLLKMKTMSYSQHLLEYLTQRSV

SEQ ID NO: 19164 - protein, 417 aa, Artificial Sequence
  Synthetic polypeptide
SHDMLCIFLFAYLFYMYLLSMLNDEIVEDENHVLFSTPTGIPDSEKCLTAEEIFSLHGFSNATQITSSKFSVICPAVLQQLNFHPCEDRPKHKTRPSHSEVWGYGFLSVTIINLASLLGLILTPLIKKSYFPKILTFFVGLAIGTLFSNAIFQLIPEAFGFDPKVDSYVEKAVAVFGGFYLLFFFERMLKMLLKTYGQNGHTHFGNDNFGPQEKTHQPKALPAINGVTCYANPAVTEANGHIHFDNVSVVSLQDGKKEPSSCTCLKGPKLSEIGTIAWMITLCDALHNFIDGLAIGASCTLSLLQGLSTSIAILCEEFPHELGDFVILLNAGMSTRQALLFNFLSACSCYVGLAFGILVGNNFAPNIIFALAGGMFLYISLADMFPEMNDMLREKIIKWATDDIKSQLHLLWIYTAR

SEQ ID NO: 19165 - protein, 433 aa, Artificial Sequence
  Synthetic polypeptide
SHDMLCIFLFAYLFYMYLLSMLNDEIVEDENHVLFSTPTGIPDSEKCLTAEEIFSLHGFSNATQITSSKFSVICPAVLQQLNFHPCEDRPKHKTRPSHSEVWGYGFLSVTIINLASLLGLILTPLIKKSYFPKILTFFVGLAIGTLFSNAIFQLIPEAFGFDPKVDSYVEKAVAVFGGFYLLFFFERMLKMLLKTYGQNGHTHFGNDNFGPQEKTHQPKALPAINGVTCYANPAVTEANGHIHFDNVSVVSLQDGKKEPSSCTCLKGPKLSEIGTIAWMITLCDALHNFIDGLAIGASCTLSLLQGLSTSIAILCEEFPHELGDFVILLNAGMSTRQALLFNFLSACSCYVGLAFGILVGNNFAPNIIFALAGGMFLYISLADMFPEMNDMLREKVTGRKTDFTFFMIQNAGMLTGFTAILLITLYAGEIELE

SEQ ID NO: 19166 - protein, 7 aa, Artificial Sequence
  Synthetic polypeptide
DSSISSV

SEQ ID NO: 19167 - protein, 376 aa, Artificial Sequence
  Synthetic polypeptide
LQYFQCLTAEEIFSLHGFSNATQITSSKFSVICPAVLQQLNFHPCEDRPKHKTRPSHSEVWGYGFLSVTIINLASLLGLILTPLIKKSYFPKILTFFVGLAIGTLFSNAIFQLIPEAFGFDPKVDSYVEKAVAVFGGFYLLFFFERMLKMLLKTYGQNGHTHFGNDNFGPQEKTHQPKALPAINGVTCYANPAVTEANGHIHFDNVSVVSLQDGKKEPSSCTCLKGPKLSEIGTIAWMITLCDALHNFIDGLAIGASCTLSLLQGLSTSIAILCEEFPHELGDFVILLNAGMSTRQALLFNFLSACSCYVGLAFGILVGNNFAPNIIFALAGGMFLYISLADMFPEMNDMLREKIIKWATDDIKSQLHLLWIYTAR

SEQ ID NO: 19168 - protein, 392 aa, Artificial Sequence
  Synthetic polypeptide
LQYFQCLTAEEIFSLHGFSNATQITSSKFSVICPAVLQQLNFHPCEDRPKHKTRPSHSEVWGYGFLSVTIINLASLLGLILTPLIKKSYFPKILTFFVGLAIGTLFSNAIFQLIPEAFGFDPKVDSYVEKAVAVFGGFYLLFFFERMLKMLLKTYGQNGHTHFGNDNFGPQEKTHQPKALPAINGVTCYANPAVTEANGHIHFDNVSVVSLQDGKKEPSSCTCLKGPKLSEIGTIAWMITLCDALHNFIDGLAIGASCTLSLLQGLSTSIAILCEEFPHELGDFVILLNAGMSTRQALLFNFLSACSCYVGLAFGILVGNNFAPNIIFALAGGMFLYISLADMFPEMNDMLREKVTGRKTDFTFFMIQNAGMLTGFTAILLITLYAGEIELE

SEQ ID NO: 19169 - protein, 9 aa, Artificial Sequence
  Synthetic polypeptide
TPVFPVFNC

SEQ ID NO: 19170 - protein, 8 aa, Artificial Sequence
  Synthetic polypeptide
FLHFQLSV

SEQ ID NO: 19171 - protein, 396 aa, Artificial Sequence
  Synthetic polypeptide
IGTAPVYSSQREQRRRRVISAFPTECLTAEEIFSLHGFSNATQITSSKFSVICPAVLQQLNFHPCEDRPKHKTRPSHSEVWGYGFLSVTIINLASLLGLILTPLIKKSYFPKILTFFVGLAIGTLFSNAIFQLIPEAFGFDPKVDSYVEKAVAVFGGFYLLFFFERMLKMLLKTYGQNGHTHFGNDNFGPQEKTHQPKALPAINGVTCYANPAVTEANGHIHFDNVSVVSLQDGKKEPSSCTCLKGPKLSEIGTIAWMITLCDALHNFIDGLAIGASCTLSLLQGLSTSIAILCEEFPHELGDFVILLNAGMSTRQALLFNFLSACSCYVGLAFGILVGNNFAPNIIFALAGGMFLYISLADMFPEMNDMLREKIIKWATDDIKSQLHLLWIYTAR

SEQ ID NO: 19172 - protein, 412 aa, Artificial Sequence
  Synthetic polypeptide
IGTAPVYSSQREQRRRRVISAFPTECLTAEEIFSLHGFSNATQITSSKFSVICPAVLQQLNFHPCEDRPKHKTRPSHSEVWGYGFLSVTIINLASLLGLILTPLIKKSYFPKILTFFVGLAIGTLFSNAIFQLIPEAFGFDPKVDSYVEKAVAVFGGFYLLFFFERMLKMLLKTYGQNGHTHFGNDNFGPQEKTHQPKALPAINGVTCYANPAVTEANGHIHFDNVSVVSLQDGKKEPSSCTCLKGPKLSEIGTIAWMITLCDALHNFIDGLAIGASCTLSLLQGLSTSIAILCEEFPHELGDFVILLNAGMSTRQALLFNFLSACSCYVGLAFGILVGNNFAPNIIFALAGGMFLYISLADMFPEMNDMLREKVTGRKTDFTFFMIQNAGMLTGFTAILLITLYAGEIELE

SEQ ID NO: 19173 - protein, 4 aa, Artificial Sequence
  Synthetic polypeptide
VFNC

SEQ ID NO: 19174 - protein, 8 aa, Artificial Sequence
  Synthetic polypeptide
DQCGQHGT

SEQ ID NO: 19175 - protein, 38 aa, Artificial Sequence
  Synthetic polypeptide
GQEFETSVANMELSDLARDPPAQCSAGPVGDDKFFFFF

SEQ ID NO: 19176 - protein, 51 aa, Artificial Sequence
  Synthetic polypeptide
GQEFETSVANMELSDLARDPPAQCSAGPVGDDMFHWQATIMGPISNYMLDN

SEQ ID NO: 19177 - protein, 52 aa, Artificial Sequence
  Synthetic polypeptide
GQEFETSVANMELSDLARDPPAQCSAGPVGDDMFHWQATIMGPNDSPYQGGV

SEQ ID NO: 19178 - protein, 81 aa, Artificial Sequence
  Synthetic polypeptide
GQEFETSVANMELSDLARDPPAQCSAGPVGDDMFHWQATIMGPNDSPYQGGVFFLTIHFPTDYPFKPPKVAFTTRIYHPNI

SEQ ID NO: 19179 - protein, 99 aa, Artificial Sequence
  Synthetic polypeptide
GQEFETSVANMELSDLARDPPAQCSAGPVGDDMFHWQATIMGPNDSPYQGGVFFLTIHFPTDYPFKPPKVAFTTRIYHPNINSNGSICLDILRSQWSPA

SEQ ID NO: 19180 - protein, 150 aa, Artificial Sequence
  Synthetic polypeptide
GQEFETSVANMELSDLARDPPAQCSAGPVGDDMFHWQATIMGPNDSPYQGGVFFLTIHFPTDYPFKPPKVAFTTRIYHPNINSNGSICLDILRSQWSPALTISKVLLSICSLLCDPNPDDPLVPEIARIYKTDRDKYNRISREWTQKYAM

SEQ ID NO: 19181 - protein, 151 aa, Artificial Sequence
  Synthetic polypeptide
GQEFETSVANMELSDLARDPPAQCSAGPVGDDMFHWQATIMGPNDSPYQGGVFFLTIHFPTDYPFKPPKVAFTTRIYHPNINSNGSICLDILRSQWSPALTISKVLLSICSLLCDPNPDDPLVPEIARIYKTDRDKYNRLAREWTEKYAML

SEQ ID NO: 19182 - protein, 58 aa, Artificial Sequence
  Synthetic polypeptide
GQEFETSVANMELSDLARDPPAQCSAGPVGDDMFHWQATIMGPQNSFLSWVDKQLYAG

SEQ ID NO: 19183 - protein, 46 aa, Artificial Sequence
  Synthetic polypeptide
SPEVRSLRPVWPTWNLVIWPVTLQHNVLQVQLGMICFIGKPQLWDL

SEQ ID NO: 19184 - protein, 53 aa, Artificial Sequence
  Synthetic polypeptide
SPEVRSLRPVWPTWNLVIWPVTLQHNVLQVQLGMICFIGKPQLWDLKIPFYPG

SEQ ID NO: 19185 - protein, 54 aa, Artificial Sequence
  Synthetic polypeptide
SPEVRSLRPVWPTWNLVIWPVTLQHNVLQVQLGMICFIGKPQLWDLMTAHIKAV

SEQ ID NO: 19186 - protein, 57 aa, Artificial Sequence
  Synthetic polypeptide
SPEVRSLRPVWPTWNLVIWPVTLQHNVLQVQLGMICFIGKPQLWDLMTAHIKAVYSF

SEQ ID NO: 19187 - protein, 41 aa, Artificial Sequence
  Synthetic polypeptide
SPEVRSLRPVWPTWNLVIWPVTLQHNVLQVQLGMISFFSFS

SEQ ID NO: 19188 - protein, 2 aa, Artificial Sequence
  Synthetic polypeptide
GT

SEQ ID NO: 19189 - protein, 53 aa, Artificial Sequence
  Synthetic polypeptide
PGTVAHACNPSTLGGQGDHLRNLVIWPVTLQHNVLQVQLGMICFIGKPQLWDL

SEQ ID NO: 19190 - protein, 60 aa, Artificial Sequence
  Synthetic polypeptide
PGTVAHACNPSTLGGQGDHLRNLVIWPVTLQHNVLQVQLGMICFIGKPQLWDLKIPFYPG

SEQ ID NO: 19191 - protein, 61 aa, Artificial Sequence
  Synthetic polypeptide
PGTVAHACNPSTLGGQGDHLRNLVIWPVTLQHNVLQVQLGMICFIGKPQLWDLMTAHIKAV

SEQ ID NO: 19192 - protein, 64 aa, Artificial Sequence
  Synthetic polypeptide
PGTVAHACNPSTLGGQGDHLRNLVIWPVTLQHNVLQVQLGMICFIGKPQLWDLMTAHIKAVYSF

SEQ ID NO: 19193 - protein, 48 aa, Artificial Sequence
  Synthetic polypeptide
PGTVAHACNPSTLGGQGDHLRNLVIWPVTLQHNVLQVQLGMISFFSFS

SEQ ID NO: 19194 - protein, 30 aa, Artificial Sequence
  Synthetic polypeptide
SPEELSDLARDPPAQCSAGPVGDDKFFFFF

SEQ ID NO: 19195 - protein, 43 aa, Artificial Sequence
  Synthetic polypeptide
SPEELSDLARDPPAQCSAGPVGDDMFHWQATIMGPISNYMLDN

SEQ ID NO: 19196 - protein, 44 aa, Artificial Sequence
  Synthetic polypeptide
SPEELSDLARDPPAQCSAGPVGDDMFHWQATIMGPNDSPYQGGV

SEQ ID NO: 19197 - protein, 73 aa, Artificial Sequence
  Synthetic polypeptide
SPEELSDLARDPPAQCSAGPVGDDMFHWQATIMGPNDSPYQGGVFFLTIHFPTDYPFKPPKVAFTTRIYHPNI

SEQ ID NO: 19198 - protein, 91 aa, Artificial Sequence
  Synthetic polypeptide
SPEELSDLARDPPAQCSAGPVGDDMFHWQATIMGPNDSPYQGGVFFLTIHFPTDYPFKPPKVAFTTRIYHPNINSNGSICLDILRSQWSPA

SEQ ID NO: 19199 - protein, 142 aa, Artificial Sequence
  Synthetic polypeptide
SPEELSDLARDPPAQCSAGPVGDDMFHWQATIMGPNDSPYQGGVFFLTIHFPTDYPFKPPKVAFTTRIYHPNINSNGSICLDILRSQWSPALTISKVLLSICSLLCDPNPDDPLVPEIARIYKTDRDKYNRISREWTQKYAM

SEQ ID NO: 19200 - protein, 143 aa, Artificial Sequence
  Synthetic polypeptide
SPEELSDLARDPPAQCSAGPVGDDMFHWQATIMGPNDSPYQGGVFFLTIHFPTDYPFKPPKVAFTTRIYHPNINSNGSICLDILRSQWSPALTISKVLLSICSLLCDPNPDDPLVPEIARIYKTDRDKYNRLAREWTEKYAML

SEQ ID NO: 19201 - protein, 50 aa, Artificial Sequence
  Synthetic polypeptide
SPEELSDLARDPPAQCSAGPVGDDMFHWQATIMGPQNSFLSWVDKQLYAG

SEQ ID NO: 19202 - protein, 44 aa, Artificial Sequence
  Synthetic polypeptide
GQARWLTPVIPALWEAKELSDLARDPPAQCSAGPVGDDKFFFFF

SEQ ID NO: 19203 - protein, 57 aa, Artificial Sequence
  Synthetic polypeptide
GQARWLTPVIPALWEAKELSDLARDPPAQCSAGPVGDDMFHWQATIMGPISNYMLDN

SEQ ID NO: 19204 - protein, 58 aa, Artificial Sequence
  Synthetic polypeptide
GQARWLTPVIPALWEAKELSDLARDPPAQCSAGPVGDDMFHWQATIMGPNDSPYQGGV

SEQ ID NO: 19205 - protein, 87 aa, Artificial Sequence
  Synthetic polypeptide
GQARWLTPVIPALWEAKELSDLARDPPAQCSAGPVGDDMFHWQATIMGPNDSPYQGGVFFLTIHFPTDYPFKPPKVAFTTRIYHPNI

SEQ ID NO: 19206 - protein, 105 aa, Artificial Sequence
  Synthetic polypeptide
GQARWLTPVIPALWEAKELSDLARDPPAQCSAGPVGDDMFHWQATIMGPNDSPYQGGVFFLTIHFPTDYPFKPPKVAFTTRIYHPNINSNGSICLDILRSQWSPA

SEQ ID NO: 19207 - protein, 156 aa, Artificial Sequence
  Synthetic polypeptide
GQARWLTPVIPALWEAKELSDLARDPPAQCSAGPVGDDMFHWQATIMGPNDSPYQGGVFFLTIHFPTDYPFKPPKVAFTTRIYHPNINSNGSICLDILRSQWSPALTISKVLLSICSLLCDPNPDDPLVPEIARIYKTDRDKYNRISREWTQKYAM

SEQ ID NO: 19208 - protein, 157 aa, Artificial Sequence
  Synthetic polypeptide
GQARWLTPVIPALWEAKELSDLARDPPAQCSAGPVGDDMFHWQATIMGPNDSPYQGGVFFLTIHFPTDYPFKPPKVAFTTRIYHPNINSNGSICLDILRSQWSPALTISKVLLSICSLLCDPNPDDPLVPEIARIYKTDRDKYNRLAREWTEKYAML

SEQ ID NO: 19209 - protein, 64 aa, Artificial Sequence
  Synthetic polypeptide
GQARWLTPVIPALWEAKELSDLARDPPAQCSAGPVGDDMFHWQATIMGPQNSFLSWVDKQLYAG

SEQ ID NO: 19210 - protein, 18 aa, Artificial Sequence
  Synthetic polypeptide
PGTVAHACNPSTLGGQGT

SEQ ID NO: 19211 - protein, 40 aa, Artificial Sequence
  Synthetic polypeptide
SQHFGRPRNLVIWPVTLQHNVLQVQLGMICFIGKPQLWDL

SEQ ID NO: 19212 - protein, 47 aa, Artificial Sequence
  Synthetic polypeptide
SQHFGRPRNLVIWPVTLQHNVLQVQLGMICFIGKPQLWDLKIPFYPG

SEQ ID NO: 19213 - protein, 48 aa, Artificial Sequence
  Synthetic polypeptide
SQHFGRPRNLVIWPVTLQHNVLQVQLGMICFIGKPQLWDLMTAHIKAV

SEQ ID NO: 19214 - protein, 51 aa, Artificial Sequence
  Synthetic polypeptide
SQHFGRPRNLVIWPVTLQHNVLQVQLGMICFIGKPQLWDLMTAHIKAVYSF

SEQ ID NO: 19215 - protein, 35 aa, Artificial Sequence
  Synthetic polypeptide
SQHFGRPRNLVIWPVTLQHNVLQVQLGMISFFSFS

SEQ ID NO: 19216 - protein, 40 aa, Artificial Sequence
  Synthetic polypeptide
APQVLLPRTRTSARPVRMRADSGKTFDCRTSSTQSTTTCT

SEQ ID NO: 19217 - protein, 2 aa, Artificial Sequence
  Synthetic polypeptide
GA

SEQ ID NO: 19218 - protein, 18 aa, Artificial Sequence
  Synthetic polypeptide
ARCGGSRLYSQHFGRPRC

SEQ ID NO: 19219 - protein, 341 aa, Artificial Sequence
  Synthetic polypeptide
GQVWWFTPVFPALWEAEVLEGKPIYVDCFGNLVPLTKSGQHHIFSFFAFKENRLPLFVKVRDTTQEPCGRLSFMKEPKSTRGLVHQAICNLNITLPIYTKESESDQEQEEEIDMTSEKNDETESTETSVLKSHLVNEVPVLASPDLLSEVSEMKQDLIKMTAILTTDVSDKAGSIKVKELVKAAEEEPGEPFEIVERVKEDLEKVNEILRSGTCTRDESSVQSSRSERGLVEEEWVIVSDEEIEEARQKAPLEITEYPCVEVRIDKEIKGKVEKDSTGLVNYLTDDLNTCVPLPKEQLQTVQDKAGKKCEALAVGRSSEKEGKDIPPDETQSTQKQHKPSL

SEQ ID NO: 19220 - protein, 358 aa, Artificial Sequence
  Synthetic polypeptide
GQVWWFTPVFPALWEAEVLEGKPIYVDCFGNLVPLTKSGQHHIFSFFAFKENRLPLFVKVRDTTQEPCGRLSFMKEPKSTRGLVHQAICNLNITLPIYTKESESDQEQEEEIDMTSEKNDETESTETSVLKSHLVNEVPVLASPDLLSEVSEMKQDLIKMTAILTTDVSDKAGSIKVKELVKAAEEEPGEPFEIVERVKEDLEKVNEILRSGTCTRDESSVQSSRSERGLVEEEWVIVSDEEIEEARQKAPLEITEYPCVEVRIDKEIKGKVEKDSTGLVNYLTDDLNTCVPLPKEQLQTVQDKAGKKCEALAVGRSSEKEGKDIPPDETQSTQKQHKPSLGIKKPVRRKLKEKQKQK

SEQ ID NO: 19221 - protein, 2600 aa, Artificial Sequence
  Synthetic polypeptide
GQVWWFTPVFPALWEAEVLEGKPIYVDCFGNLVPLTKSGQHHIFSFFAFKENRLPLFVKVRDTTQEPCGRLSFMKEPKSTRGLVHQAICNLNITLPIYTKESESDQEQEEEIDMTSEKNDETESTETSVLKSHLVNEVPVLASPDLLSEVSEMKQDLIKMTAILTTDVSDKAGSIKVKELVKAAEEEPGEPFEIVERVKEDLEKVNEILRSGTCTRDESSVQSSRSERGLVEEEWVIVSDEEIEEARQKAPLEITEYPCVEVRIDKEIKGKVEKDSTGLVNYLTDDLNTCVPLPKEQLQTVQDKAGKKCEALAVGRSSEKEGKDIPPDETQSTQKQHKPSLGIKKPVRRKLKEKQKQKEEGLQASAEKAELKKGSSEESLGEDPGLAPEPLPTVKATSPLIEETPIGSIKDKVKALQKRVEDEQKGRSKLPIRVKGKEDVPKKTTHRPHPAASPSLKSERHAPGSPSPKTERHSTLSSSAKTERHPPVSPSSKTEKHSPVSPSAKTERHSPASSSSKTEKHSPVSPSTKTERHSPVSSTKTERHPPVSPSGKTDKRPPVSPSGRTEKHPPVSPGRTEKRLPVSPSGRTDKHQPVSTAGKTEKHLPVSPSGKTEKQPPVSPTSKTERIEETMSVRELMKAFQSGQDPSKHKTGLFEHKSAKQKQPQEKGKVRVEKEKGPILTQREAQKTENQTIKRGQRLPVTGTAESKRGVRVSSIGVKKEDAAGGKEKVLSHKIPEPVQSVPEEESHRESEVPKEKMADEQGDMDLQISPDRKTSTDFSEVIKQELEDNDKYQQFRLSEETEKAQLHLDQVLTSPFNTTFPLDYMKDEFLPALSLQSGALDGSSESLKNEGVAGSPCGSLMEGTPQISSEESYKHEGLAETPETSPESLSFSPKKSEEQTGETKESTKTETTTEIRSEKEHPTTKDITGGSEERGATVTEDSETSTESFQKEATLGSPKDTSPKRQDDCTGSCSVALAKETPTGLTEEAACDEGQRTFGSSAHKTQTDSEVQESTATSDETKALPLPEASVKTDTGTESKPQGVIRSPQGLELALPSRDSEVLSAVADDSLAVSHKDSLEASPVLEDNSSHKTPDSLEPSPLKESPCRDSLESSPVEPKMKAGIFPSHFPLPAAVAKTELLTEVASVRSRLLRDPDGSAEDDSLEQTSLMESSGKSPLSPDTPSSEEVSYEVTPKTTDVSTPKPAVIHECAEEDDSENGEKKRFTPEEEMFKMVTKIKMFDELEQEAKQKRDYKKEPKQEESSSSSDPDADCSVDVDEPKHTGSGEDESGVPVLVTSESRKVSSSSESEPELAQLKKGADSGLLPEPVIRVQPPSPLPSSMDSNSSPEEVQFQPVVSKQYTFKMNEDTQEEPGKSEEEKDSESHLAEDRHAVSTEAEDRSYDKLNRDTDQPKICDGHGCEAMSPSSSAAPVSSGLQSPTGDDVDEQPVIYKESLALQGTHEKDTEGEELDVSRAESPQADCPSESFSSSSSLPHCLVSEGKELDEDISATSSIQKTEVTKTDETFENLPKDCPSQDSSITTQTDRFSMDVPVSDLAENDEIYDPQITSPYENVPSQSFFSSEESKTQTDANHTTSFHSSEVYSVTITSPVEDVVVASSSSGTVLSKESNFEGQDIKMESQQESTLWEMQSDSVSSSFEPTMSATTTVVGEQISKVIITKTDVDSDSWSEIREDDEAFEARVKEEEQKIFGLMVDRQSQGTTPDTTPARTPTEEGTPTSEQNPFLFQEGKLFEMTRSGAIDMTKRSYADESFHFFQIGQESREETLSEDVKEGATGADPLPLETSAESLALSESKETVDDEADLLPDDVSEEVEEIPASDAQLNSQMGISASTETPTKEAVSVGTKDLPTVQTGDIPPLSGVKQISCPDSSEPAVQVQLDFSTLTRSVYSDRGDDSPDSSPEEQKSVIEIPTAPMENVPFTESKSKIPVRTMPTSTPAPPSAEYESSVSEDFLSSVDEENKADEAKPKSKLPVKVPLQRVEQQLSDLDTSVQKTVAPQGQDMASIAPDNRSKSESDASSLDSKTKCPVKTRSYTETETESRERAEELELESEEGATRPKILTSRLPVKSRSTTSSCRGGTSPTKESKEHFFDLYRNSIEFFEEISDEASKLVDRLTQSEREQEIVSDDESSSALEVSVIENLPPVETEHSVPEDIFDTRPIWDESIETLIERIPDENGHDHAEDPQDEQERIEERLAYIADHLGFSWTELARELDFTEEQIHQIRIENPNSLQDQSHALLKYWLERDGKHATDTNLVECLTKINRMDIVHLMETNTEPLQERISHSYAEIEQTITLDHSEGFSVLQEELCTAQHKQKEEQAVSKESETCDHPPIVSEEDISVGYSTFQDGVPKTEGDSSATALFPQTHKEQVQQDFSGKMQDLPEESSLEYQQEYFVTTPGTETSETQKAMIVPSSPSKTPEEVSTPAEEEKLYLQTPTSSERGGSPIIQEPEEPSEHREESSPRKTSLVIVESADNQPETCERLDEDAAFEKGDDMPEIPPETVTEEEYIDEHGHTVVKKVTRKIIRRYVSSEGTEKEEIMVQGMPQEPVNIEEGDGYSKVIKRVVLKSDTEQSEDNNE

SEQ ID NO: 19222 - protein, 546 aa, Artificial Sequence
  Synthetic polypeptide
GQVWWFTPVFPALWEAEVLEGKPIYVDCFGNLVPLTKSGQHHIFSFFAFKENRLPLFVKVRDTTQEPCGRLSFMKEPKSTRGLVHQAICNLNITLPIYTKESESDQEQEEEIDMTSEKNPQDEQERIEERLAYIADHLGFSWTELARELDFTEEQIHQIRIENPNSLQDQSHALLKYWLERDGKHATDTNLVECLTKINRMDIVHLMETNTEPLQERISHSYAEIEQTITLDHSEGFSVLQEELCTAQHKQKEEQAVSKESETCDHPPIVSEEDISVGYSTFQDGVPKTEGDSSATALFPQTHKEQVQQDFSGKMQDLPEESSLEYQQEYFVTTPGTETSETQKAMIVPSSPSKTPEEVSTPAEEEKLYLQTPTSSERGGSPIIQEPEEPSEHREESSPRKTSLVIVESADNQPETCERLDEDAAFEKELTEELGELEASSDEEAMVTTRVVRRRVIIQGDDMPEIPPETVTEEEYIDEHGHTVVKKVTRKIIRRYVSSEGTEKEEIMVQGMPQEPVNIEEGDGYSKVIKRVVLKSDTEQSEDNNE

SEQ ID NO: 19223 - protein, 515 aa, Artificial Sequence
  Synthetic polypeptide
GQVWWFTPVFPALWEAEVLEGKPIYVDCFGNLVPLTKSGQHHIFSFFAFKENRLPLFVKVRDTTQEPCGRLSFMKEPKSTRGLVHQAICNLNITLPIYTKESESDQEQEEEIDMTSEKNPQDEQERIEERLAYIADHLGFSWTELARELDFTEEQIHQIRIENPNSLQDQSHALLKYWLERDGKHATDTNLVECLTKINRMDIVHLMETNTEPLQERISHSYAEIEQTITLDHSEGFSVLQEELCTAQHKQKEEQAVSKESETCDHPPIVSEEDISVGYSTFQDGVPKTEGDSSATALFPQTHKEQVQQDFSGKMQDLPEESSLEYQQEYFVTTPGTETSETQKAMIVPSSPSKTPEEVSTPAEEEKLYLQTPTSSERGGSPIIQEPEEPSEHREESSPRKTSLVIVESADNQPETCERLDEDAAFEKGDDMPEIPPETVTEEEYIDEHGHTVVKKVTRKIIRRYVSSEGTEKEEIMVQGMPQEPVNIEEGDGYSKVIKRVVLKSDTEQSEDNNE

SEQ ID NO: 19224 - protein, 596 aa, Artificial Sequence
  Synthetic polypeptide
GQVWWFTPVFPALWEAEVLEGKPIYVDCFGNLVPLTKSGQHHIFSFFAFKENRLPLFVKVRDTTQEPCGRLSFMKEPKSTRGLVHQAICNLNITLPIYTKIDMTSEKNPQDEQERIEERLAYIADHLGFSWTELARELDFTEEQIHQIRIENPNSLQDQSHALLKYWLERDGKHATDTNLVECLTKINRMDIVHLMETNTEPLQERISHSYAEIEQTITLDHSEGFSVLQEELCTAQHKQKEEQAVSKESETCDHPPIVSEEDISVGYSTFQDGVPKTEGDSSATALFPQTHKEQVQQDFSGKMQDLPEESSLEYQQEYFVTTPGTETSETQKAMIVPSSPSKTPEEVSTPAEEEKLYLQTPTSSERGGSPIIQEPEEPSEHREESSPRKTSLVIVESADNQPETCERLDEDAAFEKELTEELGELEASSDEEAMVTTRVVRRRVIIQGDDMPEIPPETVTEEEYIDEHGHTVVKKVTRKIIRRYVSSEGTEKEEIMVQGMPQEPVNIEEGDGYSKVIKRVVLKSDTEQSEVTLCEPSILSSTSQFQAEPVEGRRVSKVVKTTVVLGERMEKHLGDSSLATDLPSAKDDFEEDNNE

SEQ ID NO: 19225 - protein, 25 aa, Artificial Sequence
  Synthetic polypeptide
PGVVVHACIPSTLGGRGVRRKTHLR

SEQ ID NO: 19226 - protein, 27 aa, Artificial Sequence
  Synthetic polypeptide
AIPSSRIVQATTSSRRERSCVYQRSVC

SEQ ID NO: 19227 - protein, 27 aa, Artificial Sequence
  Synthetic polypeptide
DCSSYNFKQKREELCLSKECVLTVTWL

SEQ ID NO: 19228 - protein, 133 aa, Artificial Sequence
  Synthetic polypeptide
VTQILSTMLQLPTVFSTVMCCTGLQPGSNKLYHHLGLFKLQLQAEERGVVSIKGVCANRYLAMKEDGRLLASKCVTDECFFFERLESNNYNTYRSRKYTSWYVALKRTGQYKLGSKTGPGQKAILFLPMSAKS

SEQ ID NO: 19229 - protein, 17 aa, Artificial Sequence
  Synthetic polypeptide
RGVERRCMPHHRCPTRR

SEQ ID NO: 19230 - protein, 437 aa, Artificial Sequence
  Synthetic polypeptide
TNRYTNTTEDHSAMKRSGASLYATSQVPYETLNKRFRAAQKNIDRETSHVTMVVAELEKTLSGCPAVDSVVSLLDGVVEKLSVLKRKAVESIQAEDESAKLCKRRIEHLKEHSSDQPAAASVWKRKRMDRMMVEHLLRCGYYNTAVKLARQSGIEDLVNIEMFLTAKEVEESLERRETATCLAWCHDNKSRLRKMKGRQNKHEAKTGRKSRAASSSPKESLDLGMETLKGKPELSCLEFSLRIQEFIELIRQNKRLDAVRHARKHFSQAEGSQLDEVRQAMGMLAFPPDTHISPYKDLLDPARWRMLIQQFRYDNYRLHQLGNNSVFTLTLQAGLSAIKTPQCYKEDGSSKSPDCPVCSRSLNKLAQPLPMAHCANSRLVCKISGDVMNENNPPMMLPNGYVYGYNSLLSIRQDDKVVCPRTKEVFHFSQAEKVYIM

SEQ ID NO: 19231 - protein, 399 aa, Artificial Sequence
  Synthetic polypeptide
TNRYTNTTEDHSAMKRSGASLYATSQVPYETLNKRFRAAQKNIDRETSHVTMVVAELEKTLSGCPAVDSVVSLLDGVVEKLSVLKRKAVESIQAEDESAKLCKRRIEHLKEHSSDQPAAASVWKRKRMDRMMVEHLLRCGYYNTAVKLARQSGIEDLVNIEMFLTAKEVEESLERRETATCLAWCHDNKSRLRKMKSCLEFSLRIQEFIELIRQNKRLDAVRHARKHFSQAEGSQLDEVRQAMGMLAFPPDTHISPYKDLLDPARWRMLIQQFRYDNYRLHQLGNNSVFTLTLQAGLSAIKTPQCYKEDGSSKSPDCPVCSRSLNKLAQPLPMAHCANSRLVCKISGDVMNENNPPMMLPNGYVYGYNSLLSIRQDDKVVCPRTKEVFHFSQAEKVYIM

SEQ ID NO: 19232 - protein, 277 aa, Artificial Sequence
  Synthetic polypeptide
TNRYTNTTEDHSAMKRSGASLYATSQVPYETLNKRFRAAQKNIDRETSHVTMVVAELEKTLSGCPAVDSVVSLLDGVVEKLSVLKRKAVESIQAEDESAKLCKRRIEHLKEHSSDQPAAASVWKRKRMDRMMVEHLLRCGYYNTAVKLARQSGIEDLVNIEMFLTAKEVEESLERRETATCLAWCHDNKSRLRKMKTCKKALQPSRREPAGRGAPGHGHAGLPARHAHLPVQGPSGPCTVADADPAVPVRQLPTTPAGKQFCVHPHPAGWPLSHQDT

SEQ ID NO: 19233 - protein, 358 aa, Artificial Sequence
  Synthetic polypeptide
TNRYTNTTEDHSAMKRSGASLYATSQVPYETLNKRFRAAQKNIDRETSHVTMVVAELEKTLSGCPAVDSVVSLLDGVVEKLSVLKRKAVESIQAEDESAKLCKRRIEHLKEHSSDQPAAASVWKRKRMDRMMVEHLLRCGYYNTAVKLARQSGIESCLEFSLRIQEFIELIRQNKRLDAVRHARKHFSQAEGSQLDEVRQAMGMLAFPPDTHISPYKDLLDPARWRMLIQQFRYDNYRLHQLGNNSVFTLTLQAGLSAIKTPQCYKEDGSSKSPDCPVCSRSLNKLAQPLPMAHCANSRLVCKISGDVMNENNPPMMLPNGYVYGYNSLLSIRQDDKVVCPRTKEVFHFSQAEKVYIM

SEQ ID NO: 19234 - protein, 331 aa, Artificial Sequence
  Synthetic polypeptide
TNRYTNTTEDHSAMKRSGASLYATSQVPYETLNKRFRAAQKNIDRETSHVTMVVAELEKTLSGCPAVDSVVSLLDGVVEKLSVLKRKAVESIQAEDESAKLCKRRIEHLKEHSSDQPAAASVWKRKRMDRMMVEHLLRCGYYNTAVKLARQSGIETCKKALQPSRREPAGRGAPGHGHAGLPARHAHLPVQGPSGPCTVADADPAVPVRQLPTTPAGKQFCVHPHPAGWPLSHQDTCYKEDGSSKSPDCPVCSRSLNKLAQPLPMAHCANSRLVCKISGDVMNENNPPMMLPNGYVYGYNSLLSIRQDDKVVCPRTKEVFHFSQAEKVYIM

SEQ ID NO: 19235 - protein, 248 aa, Artificial Sequence
  Synthetic polypeptide
TNRYTNTTEDHSAMKRSGASLYATSQVPYETLNKRFRAAQKNIDRETSHVTMVVAELEKTLSGCPAVDSVVSLLDGVVEKLSVLKRKAVESIQAEDESAKLCKRRIEHLKEHSSDQPAAASVWKRKRMDRMMVEHLLRCGYYNTAVKLARQSGIETCKKALQPSRREPAGRGAPGHGHAGLPARHAHLPVQGPSGPCTVADADPAVPVRQLPTTPAGKQFCVHPHPAGWPLSHQDTTVLQGGRQLQEP

SEQ ID NO: 19236 - protein, 186 aa, Artificial Sequence
  Synthetic polypeptide
TNRYTNTTEDHSAMKRSGASLYATSQVPYETLNKRFRAAQKNIDRETSHVTMVVAELEKTLSGCPAVDSVVSLLDGVVEKLSVLKRKDLVNIEMFLTAKEVEESLERRETATCLAWCHDNKSRLRKMKSCLEFSLRIQEFIELIRQNKRLDAVRHARKHFSQAEGSQLDEVRQAMGMLAFPPDTHI

SEQ ID NO: 19237 - protein, 331 aa, Artificial Sequence
  Synthetic polypeptide
TNRYTNTTEDHSAMKRSGASLYATSQVPYETLNKRFRAAQKNIDRETSHVTMVVAELEKTLSGCPAVDSVVSLLDGVVEKLSVLKRKDLVNIEMFLTAKEVEESLERRETATCLAWCHDNKSRLRKMKSCLEFSLRIQEFIELIRQNKRLDAVRHARKHFSQAEGSQLDEVRQAMGMLAFPPDTHISPYKDLLDPARWRMLIQQFRYDNYRLHQLGNNSVFTLTLQAGLSAIKTPQCYKEDGSSKSPDCPVCSRSLNKLAQPLPMAHCANSRLVCKISGDVMNENNPPMMLPNGYVYGYNSLLSIRQDDKVVCPRTKEVFHFSQAEKVYIM

SEQ ID NO: 19238 - protein, 110 aa, Artificial Sequence
  Synthetic polypeptide
TNRYTNTTEDHSAMKRSGASLYATSQVPYETLNKRFRAAQKNIDRETSHVTMVVAELEKTLSGCPAVDSVVSLLDGVVEKLSVLKRKVGPAWRSLFSLGHGHPFCLENES

SEQ ID NO: 19239 - protein, 40 aa, Artificial Sequence
  Synthetic polypeptide
VYEYHGRPFSHEEEWSVAVCHITGALRDAEQTLSRRSEEH

SEQ ID NO: 19240 - protein, 12 aa, Artificial Sequence
  Synthetic polypeptide
ESCLPRRRRRHI

SEQ ID NO: 19241 - protein, 189 aa, Artificial Sequence
  Synthetic polypeptide
ERSSGISIPRTSLTTCFAQETFGKQYKQTIGLDFFLRRITLPGNLNVTLQIWDIGGQTIGGKMLDKYIYGAQGVLLVYDITNYQSFENLEDWYTVVKKVSEESETQPLVALVGNKIDLEHMRTIKPEKHLRFCQENGFSSHFVSAKTGDSVFLCFQKVAAEILGIKLNKAEIEQSQGHFIIFISSTNRE

SEQ ID NO: 19242 - protein, 205 aa, Artificial Sequence
  Synthetic polypeptide
ERSSGISIPRTSLTTCFAQETFGKQYKQTIGLDFFLRRITLPGNLNVTLQIWDIGGQTIGGKMLDKYIYGAQGVLLVYDITNYQSFENLEDWYTVVKKVSEESETQPLVALVGNKIDLEHMRTIKPEKHLRFCQENGFSSHFVSAKTGDSVFLCFQKVAAEILGIKLNKAEIEQSQRIVRAEIVKYPEEENQHTTSTQSRICSVQ

SEQ ID NO: 19243 - protein, 206 aa, Artificial Sequence
  Synthetic polypeptide
ERSSGISIPRTSLTTCFAQETFGKQYKQTIGLDFFLRRITLPGNLNVTLQIWDIGGQTIGGKMLDKYIYGAQGVLLVYDITNYQSFENLEDWYTVVKKVSEESETQPLVALVGNKIDLEHMRTIKPEKHLRFCQENGFSSHFVSAKTGDSVFLCFQKVAAEILGIKLNKAEIEQSQRVVKADIVNYNQEPMSRTVNPPRSSMCAVQ

SEQ ID NO: 19244 - protein, 80 aa, Artificial Sequence
  Synthetic polypeptide
ERSSGISIPRTSLTTCFAQETFGKQYKQTIGLDFFLRRITLPGNLNVTLQIWDIGGQTIGGKMLDKYIYGAQLIWSICEQ

SEQ ID NO: 19245 - protein, 62 aa, Artificial Sequence
  Synthetic polypeptide
LWNQYSPDLLNYVFCSRNFWETVQTNYRTGFLFEKDNIARKLECYPSNLGYRRADNRRQNVG

SEQ ID NO: 19246 - protein, 13 aa, Artificial Sequence
  Synthetic polypeptide
RSVALESVFPGPP

SEQ ID NO: 19247 - protein, 39 aa, Artificial Sequence
  Synthetic polypeptide
PSVVAAPVVPATQEAEAGEWREPGRQSLQEVFASYYMKR

SEQ ID NO: 19248 - protein, 28 aa, Artificial Sequence
  Synthetic polypeptide
SQLLRRLRQENGVNLGGRACRKCSPVTT

SEQ ID NO: 19249 - protein, 185 aa, Artificial Sequence
  Synthetic polypeptide
TWEAELAGSVRQLLHEKIRDAYTHPQFVTDVMKPLQIENIIDQEVQTLSGGELQRVALALCLGKPADVYLIDEPSAYLDSEQRLMAARVVKRFILHAKKTAFVVEHDFIMATYLADRVIVFDGVPSKNTVANSPQTLLAGMNKFLSQLEITFRRDPNNYRPRINKLNSIKDVEQKKSGNYFFLDD

SEQ ID NO: 19250 - protein, 39 aa, Artificial Sequence
  Synthetic polypeptide
GQAQWFMPVIPELWEAKEIETILSNGCRTKEEWKLLFLG

SEQ ID NO: 19251 - protein, 2 aa, Artificial Sequence
  Synthetic polypeptide
RM

SEQ ID NO: 19252 - protein, 31 aa, Artificial Sequence
  Synthetic polypeptide
SQNFGKPRRSRPSCLTDVEQKKSGNYFFLDD

SEQ ID NO: 19253 - protein, 291 aa, Artificial Sequence
  Synthetic polypeptide
FYIMLLAGRWPFDHNDFGVFLCKLFPFLQKSSVGITVLNLCALSVDRYRAVASWSRVQGIGIPLVTAIEIVSIWILSFILAIPEAIGFVMVPFEYRGEQHKTCMLNATSKFMEFYQDVKDWWLFGFYFCMPLVCTAIFYTLMTCEMLNRRNGSLRIALSEHLKQRREVAKTVFCLVVIFALCWFPLHLSRILKKTVYNEMDKNRCELLSFLLLMDYIGINLATMNSCINPIALYFVSKKFKNCFQSCLCCCCYQSKSLMTSVPMNGTSIQWKNHDQNNHNTDRSSHKDSMN

SEQ ID NO: 19254 - protein, 51 aa, Artificial Sequence
  Synthetic polypeptide
FYIMLLAGRWPFDHNDFGVFLCKLFPFLQKSSVGITVLNLCALSVDSSTKM

SEQ ID NO: 19255 - protein, 16 aa, Artificial Sequence
  Synthetic polypeptide
GLPLILHYAAGWALAF

SEQ ID NO: 19256 - protein, 75 aa, Artificial Sequence
  Synthetic polypeptide
LQENKLRAPTDFTLCCWLGAGLLITMTLAYFFASCSPFCRSPRWGSPSSTSALLVLTGTEQLPPGVVFRELGFLW

SEQ ID NO: 19257 - protein, 62 aa, Artificial Sequence
  Synthetic polypeptide
LQENKLRAPTDFTLCCWLGAGLLITMTLAYFFASCSPFCRSPRWGSPSSTSALLVLTVLPRC

SEQ ID NO: 19258 - protein, 36 aa, Artificial Sequence
  Synthetic polypeptide
CLGLLPTILGLRVCQWPSGSLLIHSETLSLSLSVML

SEQ ID NO: 19259 - protein, 16 aa, Artificial Sequence
  Synthetic polypeptide
GSVSGPAEVCSFTQRL

SEQ ID NO: 19260 - protein, 777 aa, Artificial Sequence
  Synthetic polypeptide
QEVWVLQGEASFCHRRREEGWFSTFLYSLMMPGTATHYLGPEGLSVAQRKFAHSLRDFKFEFIGDAVTDDERCIDASLREFSNFLKNLEEQREIMALSVTETLIKPLEKFRKEQLGAVKEEKKKFDKETEKNYSLIDKHLNLSAKKKDSHLQEADIQVEQNRQHFYELSLEYVCKLQEIQERKKFEFVEPMLSFFQGMFTFYHQGHELAKDFNHYKMELQINIQNTRNRFEGTRSEVEELMNKIRQNPKDHKRASQFTAEGYLYVQEKRPAPFGSSWVKHYCMYRKAAKKFNMIPFEHRSGGKLGDGEVFFLKECTKRHTDSIDRRFCFDIEAADRPGVSLTMQAFSEEERKQWLEALGGKEALSHSFNTAIIPRPEGNAQLDKMGFTIIRKCISAVETRGINDQGLYRVVGVSSKVQRLLSMLMDVKTCNEVDLENSADWEVKTITSALKQYLRSLPEPLMTYELHGDFIVPAKSGSPESRVNAIHFLVHKLPEKNKEMLDILVKHLTNVSNHSKQNLMTVANLGVVFGPTLMRPQEETVAALMDLKFQNIVVEILIENHEKIFRTPPDTTFPEPTCLSASPPNAPPRQSKRQGQRTKRPVAVYNLCLELEDGDNPYPSKEDTPTSSLDSLSSPSPVTTAVPGPPGPDKNHLLADGGSFGDWASTIPGQTRSSMVQWLNPQSPTTTSSNSAVTPLSPGSSPFPFSPPATVADKPPESIRSRKARAVYPCEAEHSSELSFEIGAIFEDVQTSREPGWLEGTLNGKRGLIPQNYVKLL

SEQ ID NO: 19261 - protein, 34 aa, Artificial Sequence
  Synthetic polypeptide
KYKISRAWWCMPVIPTTREAEAGELLEPGRRSLR

SEQ ID NO: 19262 - protein, 133 aa, Artificial Sequence
  Synthetic polypeptide
SQLLGRLRQENCLNLGGGACGDNPYPSKEDTPTSSLDSLSSPSPVTTAVPGPPGPDKNHLLADGGSFGDWASTIIRSRKARAVYPCEAEHSSELSFEIGAIFEDVQTSREPGWLEGTLNGKRGLIPQNYVKLL

SEQ ID NO: 19263 - protein, 184 aa, Artificial Sequence
  Synthetic polypeptide
SQLLGRLRQENCLNLGGGACGDNPYPSKEDTPTSSLDSLSSPSPVTTAVPGPPGPDKNHLLADGGSFGDWASTIPGQTRSSMVQWLNPQSPTTTSSNSAVTPLSPGSSPFPFSPPATVADKPPESIRSRKARAVYPCEAEHSSELSFEIGAIFEDVQTSREPGWLEGTLNGKRGLIPQNYVKLL

SEQ ID NO: 19264 - protein, 31 aa, Artificial Sequence
  Synthetic polypeptide
TWEAELAVTILTLPRRTPLPAVWTHFPPRLP

SEQ ID NO: 19265 - protein, 982 aa, Artificial Sequence
  Synthetic polypeptide
CSPGLPFENYFLTIILLIHYVSSPLQLHFMLFVVLGPCFLQDCLCLIVQSLCAQYSADKREDEKMCDHLIRAAKYRDHVTATQLIQKIINILTDKHGAWGNSAVSRPLEFWRLDYWEDDLRRRRRFVRNPLGSTHPEATLKTAVEHATDEDILAKGKQSIRSQALGNQNSENEILLEGDDDTLSSVDEKDLENLAGPVSLSTPAQLVAPSVVVKGTLSVTSSELYFEVDEEDPNFKKIDPKILAYTEGLHGKWLFTEIRSIFSRRYLLQNTALEIFMANRVAVMFNFPDPATVKKVVNYLPRVGVGTSFGLPQTRRISLASPRQLFKASNMTQRWQHREISNFEYLMFLNTIAGRSYNDLNQYPVFPWVITNYESEELDLTLPTNFRDLSKPIGALNPKRAAFFAERYESWEDDQVPKFHYGTHYSTASFVLAWLLRIEPFTTYFLNLQGGKFDHADRTFSSISRAWRNSQRDTSDIKELIPEFYYLPEMFVNFNNYNLGVMDDGTVVSDVELPPWAKTSEEFVHINRLALESEFVSCQLHQWIDLIFGYKQQGPEAVRALNVFYYLTYEGAVNLNSITDPVLREAVEAQIRSFGQTPSQLLIEPHPPRGSAMQVSPLMFTDKAQQDVIMVLKFPSNSPVTHVAANTQPGLATPAVITVTANRLFAVNKWHNLPAHQGAVQDQPYQLPVEIDPLIASNTGMHRRQITDLLDQSIQVHSQCFVITSDNRYILVCGFWDKSFRVYSTDTGRLIQVVFGHWDVVTCLARSESYIGGNCYILSGSRDATLLLWYWNGKCSGIGDNPGETAAPRAILTGHDYEVTCAAVCAELGLVLSGSQEGPCLIHSMNGDLLRTLEGPENCLKPKLIQASREGHCVIFYENGLFCTFSVNGKLQATMETDDNIRAIQLSRDGQYLLTGGDRGVVVVRQVSDLKQLFAYPGCDAGIRAMALSYDQRCIISGMASGSIVLFYNDFNRWHHEYQTRY

SEQ ID NO: 19266 - protein, 983 aa, Artificial Sequence
  Synthetic polypeptide
CSPGLPFENYFLTIILLIHYVSSPLQLHFMLFVVLGPCFLQDCLCLIVQSLCAQYSADKREDEKMCDHLIRAAKYRDHVTATQLIQKIINILTDKHGAWGNSAVSRPLEFWRLDYWEDDLRRRRRFVRNPLGSTHPEATLKTAVEHATDEDILAKGKQSIRSQALGNQNSENEILLEGDDDTLSSVDEKDLENLAGPVSLSTPAQLVAPSVVVKGTLSVTSSELYFEVDEEDPNFKKIDPKILAYTEGLHGKWLFTEIRSIFSRRYLLQNTALEIFMANRVAVMFNFPDPATVKKVVNYLPRVGVGTSFGLPQTRRISLASPRQLFKASNMTQRWQHREISNFEYLMFLNTIAGRSYNDLNQYPVFPWVITNYESEELDLTLPTNFRDLSKPIGALNPKRAAFFAERYESWEDDQVPKFHYGTHYSTASFVLAWLLRIEPFTTYFLNLQGGKFDHADRTFSSISRAWRNSQRDTSDIKELIPEFYYLPEMFVNFNNYNLGVMDDGTVVSDVELPPWAKTSEEFVHINRLALESEFVSCQLHQWIDLIFGYKQQGPEAVRALNVFYYLTYEGAVNLNSITDPVLREAVEAQIRSFGQTPSQLLIEPHPPRGSAMQVSPLMFTDKAQQDVIMVLKFPSNSPVTHVAANTQPGLATPAVITVTANRLFAVNKWHNLPAHQGAVQDQPYQLPVEIDPLIASNTGMHRRQITDLLDQSIQVHSQCFVITSDNRYILVCGFWDKSFRVYSTDTGRLIQVVFGHWDVVTCLARSESYIGGNCYILSGSRDATLLLWYWNGKCSGIGDNPGSETAAPRAILTGHDYEVTCAAVCAELGLVLSGSQEGPCLIHSMNGDLLRTLEGPENCLKPKLIQASREGHCVIFYENGLFCTFSVNGKLQATMETDDNIRAIQLSRDGQYLLTGGDRGVVVVRQVSDLKQLFAYPGCDAGIRAMALSYDQRCIISGMASGSIVLFYNDFNRWHHEYQTRY

SEQ ID NO: 19267 - protein, 706 aa, Artificial Sequence
  Synthetic polypeptide
CSPGLPFENYFLTIILLIHYVSSPLQLHFMLFVVLGPCFLQDCLCLIVQSLCAQYSADKREDEKMCDHLIRAAKYRDHVTATQLIQKIINILTDKHGAWGNSAVSRPLEFWRLDYWEDDLRRRRRFVRNPLGSTHPEATLKTAVEHATDEDILAKGKQSIRSQALGNQNSENEILLEGDDDTLSSVDEKDLENLAGPVSLSTPAQLVAPSVVVKGTLSVTSSELYFEVDEEDPNFKKIDPKILAYTEGLHGKWLFTEIRSIFSRRYLLQNTALEIFMANRVAVMFNFPDPATVKKVVNYLPRVGVGTSFGLPQTRRISLASPRQLFKASNMTQRWQHREISNFEYLMFLNTIAGRSYNDLNQYPVFPWVITNYESEELDLTLPTNFRDLSKPIGALNPKRAAFFAERYESWEDDQVPKFHYGTHYSTASFVLAWLLRIEPFTTYFLNLQGGKFDHADRTFSSISRAWRNSQRDTSDIKELIPEFYYLPEMFVNFNNYNLGVMDDGTVVSDVELPPWAKTSEEFVHINRLALESEFVSCQLHQWIDLIFGYKQQGPEAVRALNVFYYLTYEGAVNLNSITDPVLREAVEAQIRSFGQTPSQLLIEPHPPRGSAMQVSPLMFTDKAQQDVIMVLKFPSNSPVTHVAANTQPGLATPAVITVTANRLFAVNKWHNLPAHQGAVQDQPYQLPVEIDPLIGLSLPSLFAIH

SEQ ID NO: 19268 - protein, 994 aa, Artificial Sequence
  Synthetic polypeptide
CSPGLPFENYFLTIILLIHYVSSPLQLHFMLFVVLGPCFLQDCLCLIVQSLCAQYSADKREDEKMCDHLIRAAKYRDHVTATQLIQKIINILTDKHGAWGNSAVSRPLEFWRLDYWEDDLRRRRRFVRNPLGSTHPEATLKTAVEHVCIFKLRENSKATDEDILAKGKQSIRSQALGNQNSENEILLEGDDDTLSSVDEKDLENLAGPVSLSTPAQLVAPSVVVKGTLSVTSSELYFEVDEEDPNFKKIDPKILAYTEGLHGKWLFTEIRSIFSRRYLLQNTALEIFMANRVAVMFNFPDPATVKKVVNYLPRVGVGTSFGLPQTRRISLASPRQLFKASNMTQRWQHREISNFEYLMFLNTIAGRSYNDLNQYPVFPWVITNYESEELDLTLPTNFRDLSKPIGALNPKRAAFFAERYESWEDDQVPKFHYGTHYSTASFVLAWLLRIEPFTTYFLNLQGGKFDHADRTFSSISRAWRNSQRDTSDIKELIPEFYYLPEMFVNFNNYNLGVMDDGTVVSDVELPPWAKTSEEFVHINRLALESEFVSCQLHQWIDLIFGYKQQGPEAVRALNVFYYLTYEGAVNLNSITDPVLREAVEAQIRSFGQTPSQLLIEPHPPRGSAMQVSPLMFTDKAQQDVIMVLKFPSNSPVTHVAANTQPGLATPAVITVTANRLFAVNKWHNLPAHQGAVQDQPYQLPVEIDPLIASNTGMHRRQITDLLDQSIQVHSQCFVITSDNRYILVCGFWDKSFRVYSTDTGRLIQVVFGHWDVVTCLARSESYIGGNCYILSGSRDATLLLWYWNGKCSGIGDNPGSETAAPRAILTGHDYEVTCAAVCAELGLVLSGSQEGPCLIHSMNGDLLRTLEGPENCLKPKLIQASREGHCVIFYENGLFCTFSVNGKLQATMETDDNIRAIQLSRDGQYLLTGGDRGVVVVRQVSDLKQLFAYPGCDAGIRAMALSYDQRCIISGMASGSIVLFYNDFNRWHHEYQTRY

SEQ ID NO: 19269 - protein, 54 aa, Artificial Sequence
  Synthetic polypeptide
KLFLNHYSPYSLCLKSFATSLHAVCRAGPLLLTRLSLSHCSVTVCPVFCRQTRR

SEQ ID NO: 19270 - protein, 56 aa, Artificial Sequence
  Synthetic polypeptide
PLFSLFTMSQVLCNFTSCCLSCWAPASYKTVFVSLFSHCVPSILQTNEKMRRCVII

SEQ ID NO: 19271 - protein, 56 aa, Artificial Sequence
  Synthetic polypeptide
GFQAELWCPPIRVSYVLACLVNRWVRPLQVSFQGRTEEPSEGEFIHYKGTSRTNYL

SEQ ID NO: 19272 - protein, 67 aa, Artificial Sequence
  Synthetic polypeptide
GFQAELWCPPIRVSYVLACLVNRWVRPLQVSFQGRTEEPSEGEFIHYKGTSRTNYLVEKAYIFSHQF

SEQ ID NO: 19273 - protein, 8 aa, Artificial Sequence
  Synthetic polypeptide
GNFSDKLF

SEQ ID NO: 19274 - protein, 1448 aa, Artificial Sequence
  Synthetic polypeptide
GNFSDKLFSGKGLHFQPSVLDFGIQFLGHPVAKILHAYNPSRDSEVVVNSVFAAAGHFHVPPVPCRVIPAMGKTSFRIIFLPTEEGSIESSLFINTSSYGVLSYHVSGIGTRRISTEGSAKQLPNAYFLLPKVQSIQLSQMQAETTNTSLLQVQLECSLHNKVCQQLKGCYLESDDVLRLQMSIMVTMENFSKEFEENTQHLLDHLSIVYVATDESETSDDSAVNMYILHSGNSLIWIQDIRHFSQRDALSLQFEPVLLPTSTTNFTKIASFTCKAATSCDSGIIEDVKKTTHTPTLKACLFSSVAQGYFRMDSSATQFHIETHENTSGLWSIWYRNHFDRSVVLNDVFLSKETKHMLKILNFTGPLFLPPGCWNIFSLKLAVKDIAINLFTNVFLTTNIGAIFAIPLQIYSAPTKEGSLGFEVIAHCGMHYFMGKSKAGNPNWNGSLSLDQSTWNVDSELANKLYERWKKYKNGDVCKFGTDMQMINFTTGEFQLTEACPYLGTHSEESRFGILHLHLQPLEMKRVGVVFTPADYGKVTSLILIRNNLTVIDMIGVEGFGARELLKVGGRLPGAGGSLRFKVPESTLMDCRRQLKDSKQILSITKNFKVENIGPLPITVSSLKINGYNCQGYGFEVLDCHQFSLDPNTSRDISIVFTPDFTSSWVIRDLSLVTAADLEFRFTLNVTLPHHLLPLCADVVPGPSWEESFWRLTVFFVSLSLLGVILIAFQQAQYILMEFMKTRQRQNASSSSQQNNGPMDVISPHSYKSNCKNFLDTYGPSDKGRGKNCLPVNTPQSRIQNAAKRSPATYGHSQKKHKCSVYYSKHKTSTAAASSTSTTTEEKQTSPLGSSLPAAKEDICTDAMRENWISLRYASGINVNLQKNLTLPKNLLNKEENTLKNTIVFSNPSSECSMKEGIQTCMFPKETDIKTSENTAEFKERELCPLKTSKKLPENHLPRNSPQYHQPDLPEISRKNNGNNQQVPVKNEVDHCENLKKVDTKPSSEKKIHKTSREDMFSEKQDIPFVEQEDPYRKKKLQEKREGNLQNLNWSKSRTCRKNKKRGVAPVSRPPEQSDLKLVCSDFERSELSSDINVRSWCIQESTREVCKADAEIASSLPAAQREAEGYYQKPEKKCVDKFCSDSSSDCGSSSGSVRASRGSWGSWSSTSSSDGDKKPMVDAQHFLPAGDSVSQNDFPSEAPISLNLSHNICNPMTVNSLPQYAEPSCPSLPAGPTGVEEDKGLYSPGDLWPTPPVCVTSSLNCTLENGVPCVIQESAPVHNSFIDWSATCEGQFSSAYCPLELNDYNAFPEENMNYANGFPCPADVQTDFIDHNSQSTWNTPPNMPAAWGHASFISSPPYLTSTRSLSPMSGLFGSIWAPQSDVYENCCPINPTTEHSTHMENQAVVCKEYYPGFNPFRAYMNLDIWTTTANRNANFPLSRDSSYCGNV

SEQ ID NO: 19275 - protein, 1532 aa, Artificial Sequence
  Synthetic polypeptide
GNFSDKLFSGKGLHFQPSVLDFGIQFLGHPVAKILHAYNPSRDSEVVVNSVFAAAGHFHVPPVPCRVIPAMGKTSFRIIFLPTEEGSIESSLFINTSSYGVLSYHVSGIGTRRISTEGSAKQLPNAYFLLPKVQSIQLSQMQAETTNTSLLQVQLECSLHNKVCQQLKGCYLESDDVLRLQMSIMVTMENFSKEFEENTQHLLDHLSIVYVATDESETSDDSAVNMYILHSGNSLIWIQDIRHFSQRDALSLQFEPVLLPTSTTNFTKIASFTCKAATSCDSGIIEDVKKTTHTPTLKACLFSSVAQGYFRMDSSATQFHIETHENTSGLWSIWYRNHFDRSVVLNDVFLSKETKHMLKILNFTGPLFLPPGCWNIFSLKLAVKDIAINLFTNVFLTTNIGAIFAIPLQIYSAPTKEGSLGFEVIAHCGMHYFMGKSKAGNPNWNGSLSLDQSTWNVDSELANKLYERWKKYKNGDVCKRNVLGTTRFAHLKKSKESESFVFFLPRLIAEPGLMLNFSATALRSRMIKYFVVQNPSSWPVSLQLLPLSLYPKPEALVHLLHRWFGTDMQMINFTTGEFQLTEACPYLGTHSEESRFGILHLHLQPLEMKRVGVVFTPADYGKVTSLILIRNNLTVIDMIGVEGFGARELLKVGGRLPGAGGSLRFKVPESTLMDCRRQLKDSKQILSITKNFKVENIGPLPITVSSLKINGYNCQGYGFEVLDCHQFSLDPNTSRDISIVFTPDFTSSWVIRDLSLVTAADLEFRFTLNVTLPHHLLPLCADVVPGPSWEESFWRLTVFFVSLSLLGVILIAFQQAQYILMEFMKTRQRQNASSSSQQNNGPMDVISPHSYKSNCKNFLDTYGPSDKGRGKNCLPVNTPQSRIQNAAKRSPATYGHSQKKHKCSVYYSKHKTSTAAASSTSTTTEEKQTSPLGSSLPAAKEDICTDAMRENWISLRYASGINVNLQKNLTLPKNLLNKEENTLKNTIVFSNPSSECSMKEGIQTCMFPKETDIKTSENTAEFKERELCPLKTSKKLPENHLPRNSPQYHQPDLPEISRKNNGNNQQVPVKNEVDHCENLKKVDTKPSSEKKIHKTSREDMFSEKQDIPFVEQEDPYRKKKLQEKREGNLQNLNWSKSRTCRKNKKRGVAPVSRPPEQSDLKLVCSDFERSELSSDINVRSWCIQESTREVCKADAEIASSLPAAQREAEGYYQKPEKKCVDKFCSDSSSDCGSSSGSVRASRGSWGSWSSTSSSDGDKKPMVDAQHFLPAGDSVSQNDFPSEAPISLNLSHNICNPMTVNSLPQYAEPSCPSLPAGPTGVEEDKGLYSPGDLWPTPPVCVTSSLNCTLENGVPCVIQESAPVHNSFIDWSATCEGQFSSAYCPLELNDYNAFPEENMNYANGFPCPADVQTDFIDHNSQSTWNTPPNMPAAWGHASFISSPPYLTSTRSLSPMSGLFGSIWAPQSDVYENCCPINPTTEHSTHMENQAVVCKEYYPGFNPFRAYMNLDIWTTTANRNANFPLSRDSSYCGNV

SEQ ID NO: 19276 - protein, 1531 aa, Artificial Sequence
  Synthetic polypeptide
GNFSDKLFSGKGLHFQPSVLDFGIQFLGHPVAKILHAYNPSRDSEVVVNSVFAAAGHFHVPPVPCRVIPAMGKTSFRIIFLPTEEGSIESSLFINTSSYGVLSYHVSGIGTRRISTEGSAKQLPNAYFLLPKVQSIQLSQMQAETTNTSLLQVQLECSLHNKVCQQLKGCYLESDDVLRLQMSIMVTMENFSKEFEENTQHLLDHLSIVYVATDESETSDDSAVNMYILHSGNSLIWIQDIRHFSQRDALSLQFEPVLLPTSTTNFTKIASFTCKATSCDSGIIEDVKKTTHTPTLKACLFSSVAQGYFRMDSSATQFHIETHENTSGLWSIWYRNHFDRSVVLNDVFLSKETKHMLKILNFTGPLFLPPGCWNIFSLKLAVKDIAINLFTNVFLTTNIGAIFAIPLQIYSAPTKEGSLGFEVIAHCGMHYFMGKSKAGNPNWNGSLSLDQSTWNVDSELANKLYERWKKYKNGDVCKRNVLGTTRFAHLKKSKESESFVFFLPRLIAEPGLMLNFSATALRSRMIKYFVVQNPSSWPVSLQLLPLSLYPKPEALVHLLHRWFGTDMQMINFTTGEFQLTEACPYLGTHSEESRFGILHLHLQPLEMKRVGVVFTPADYGKVTSLILIRNNLTVIDMIGVEGFGARELLKVGGRLPGAGGSLRFKVPESTLMDCRRQLKDSKQILSITKNFKVENIGPLPITVSSLKINGYNCQGYGFEVLDCHQFSLDPNTSRDISIVFTPDFTSSWVIRDLSLVTAADLEFRFTLNVTLPHHLLPLCADVVPGPSWEESFWRLTVFFVSLSLLGVILIAFQQAQYILMEFMKTRQRQNASSSSQQNNGPMDVISPHSYKSNCKNFLDTYGPSDKGRGKNCLPVNTPQSRIQNAAKRSPATYGHSQKKHKCSVYYSKHKTSTAAASSTSTTTEEKQTSPLGSSLPAAKEDICTDAMRENWISLRYASGINVNLQKNLTLPKNLLNKEENTLKNTIVFSNPSSECSMKEGIQTCMFPKETDIKTSENTAEFKERELCPLKTSKKLPENHLPRNSPQYHQPDLPEISRKNNGNNQQVPVKNEVDHCENLKKVDTKPSSEKKIHKTSREDMFSEKQDIPFVEQEDPYRKKKLQEKREGNLQNLNWSKSRTCRKNKKRGVAPVSRPPEQSDLKLVCSDFERSELSSDINVRSWCIQESTREVCKADAEIASSLPAAQREAEGYYQKPEKKCVDKFCSDSSSDCGSSSGSVRASRGSWGSWSSTSSSDGDKKPMVDAQHFLPAGDSVSQNDFPSEAPISLNLSHNICNPMTVNSLPQYAEPSCPSLPAGPTGVEEDKGLYSPGDLWPTPPVCVTSSLNCTLENGVPCVIQESAPVHNSFIDWSATCEGQFSSAYCPLELNDYNAFPEENMNYANGFPCPADVQTDFIDHNSQSTWNTPPNMPAAWGHASFISSPPYLTSTRSLSPMSGLFGSIWAPQSDVYENCCPINPTTEHSTHMENQAVVCKEYYPGFNPFRAYMNLDIWTTTANRNANFPLSRDSSYCGNV

SEQ ID NO: 19277 - protein, 34 aa, Artificial Sequence
  Synthetic polypeptide
IGGLGHCRSASRGGLRNLLRENSFIIRELLGQTI

SEQ ID NO: 19278 - protein, 52 aa, Artificial Sequence
  Synthetic polypeptide
ATWRDPASTSKQTKNWLGQQPLLKEKPQVFIQNKGRVLSFPSFWCWLPGLNC

SEQ ID NO: 19279 - protein, 72 aa, Artificial Sequence
  Synthetic polypeptide
HFGSSVREDHLNPGIQDQPRQHGETPPLQANKQKIGWGSSRYSKKSPKSLYRTKGGSYHSPLSGAGFQDSTV

SEQ ID NO: 19280 - protein, 60 aa, Artificial Sequence
  Synthetic polypeptide
TQAFKTSLGNMARPRLYKQTNKKLAGAAAATQRKAPSLYTEQRAGLIIPLFLVLASRTQL

SEQ ID NO: 19281 - protein, 270 aa, Artificial Sequence
  Synthetic polypeptide
CQILVRMWRKWISHMSLVDVNATAVSRRVQDPQHERIITVSTNGSIHSPRFPHTYPRNTVLVWRLVAVEENVWIQLTFDERFGLEDPEDDICKYDFVEVEEPSDGTILGRWCGSGTVPGKQISKGNQIRIRFVSDEYFPSEPGFCIHYNIVMPQFTEAVSPSVLPPSALPLDLLNNAITAFSTLEDLIRYLEPERWQLDLEDLYRPTWQLLGKAFVFGRKSRVVDLNLLTEEVLQLRPKTGVRGLHKSLTDVALEHHEECDCVCRGSTGG

SEQ ID NO: 19282 - protein, 333 aa, Artificial Sequence
  Synthetic polypeptide
CQILVRMWRKWISHMSLVDVNATAVSRRVQDPQHERIITVSTNGSIHSPRFPHTYPRNTVLVWRLVAVEENVWIQLTFDERFGLEDPEDDICKYDFVEVEEPSDGTILGRWCGSGTVPGKQISKGNQIRIRFVSDEYFPSEPGFCIHYNIVMPQFTEAVSPSVLPPSALPLDLLNNAITAFSTLEDLIRYLEPERWQLDLEDLYRPTWQLLGKAFVFGRKSRVVDLNLLTEEVRLYSCTPRNFSVSIREELKRTDTIFWPGCLLVKRCGGNCACCLHNCNECQCVPSKVTKKYHEVLQLRPKTGVRGLHKSLTDVALEHHEECDCVCRGSTGG

SEQ ID NO: 19283 - protein, 51 aa, Artificial Sequence
  Synthetic polypeptide
DSTTHLLEWLEQRKMLVMPNTGEDVEKMDLPYVTGGCKCYSRLKKSTRSSA

SEQ ID NO: 19284 - protein, 44 aa, Artificial Sequence
  Synthetic polypeptide
MLQPSQEEYKILSMRELLLCLLMEVFTAQGFLILIQEIRSWYGD

SEQ ID NO: 19285 - protein, 10 aa, Artificial Sequence
  Synthetic polypeptide
KYLLSPQLGL

SEQ ID NO: 19286 - protein, 199 aa, Artificial Sequence
  Synthetic polypeptide
MAESIFSVLSLASECTTLAAELPKVSYVKALDVWLIACLLFGFASLVEYAVVQVMLNNPKRVEAEKARIAKAEQADGKGGNVAKKNTVNGTGTPVHISTLQVGETRCKKVCTSKSDLRSNDFSIVGSLPRDFELSNYDCYGKPIEVNNGLGKSQAKNNKKPPPAKPVIPTAAKRIDLYARALFPFCFLFFNVIYWSIYL

SEQ ID NO: 19287 - protein, 27 aa, Artificial Sequence
  Synthetic polypeptide
WLKVSSQSSAWPLSAQPLPLSFPKFPM

SEQ ID NO: 19288 - protein, 3 aa, Artificial Sequence
  Synthetic polypeptide
KLV

SEQ ID NO: 19289 - protein, 16 aa, Artificial Sequence
  Synthetic polypeptide
KLVRPDAKKFVLLSLI

SEQ ID NO: 19290 - protein, 5 aa, Artificial Sequence
  Synthetic polypeptide
MAESW

SEQ ID NO: 19291 - protein, 5 aa, Artificial Sequence
  Synthetic polypeptide
WLKVG

SEQ ID NO: 19292 - protein, 19 aa, Artificial Sequence
  Synthetic polypeptide
WLKVGETRCKKVCTSKSDL

SEQ ID NO: 19293 - protein, 101 aa, Artificial Sequence
  Synthetic polypeptide
WLKVGETRCKKVCTSKSDLRSNDFSIVGSLPRDFELSNYDCYGKPIEVNNGLGKSQAKNNKKPPPAKPVIPTAAKRIDLYARALFPFCFLFFNVIYWSIYL

SEQ ID NO: 19294 - protein, 34 aa, Artificial Sequence
  Synthetic polypeptide
CVMKALTRCQHQVLGLRGLQNCEKHIFFFPITTL

SEQ ID NO: 19295 - protein, 30 aa, Artificial Sequence
  Synthetic polypeptide
KPSPDASTRFLDFVAFRTVKNIFFSFPSQH

SEQ ID NO: 19296 - protein, 11 aa, Artificial Sequence
  Synthetic polypeptide
KTYFFLSHHNI

SEQ ID NO: 19297 - protein, 459 aa, Artificial Sequence
  Synthetic polypeptide
AQEQHGIKRVLNSIGSDIDNVTQRLPIQDILSAFSVYVNNTESYIHRNLPTLEEYDSYWWLGGLVICSLLTLIVIFYYLGLLCGVCGYDRHATPTTRGCVSNTGGVFLMVGVGLSFLFCWILMIIVVLTFVFGANVEKLICEPYTSKELFRVLDTPYLLNEDWEYYLSGKLFNKSKMKLTFEQVYSDCKKNRGTYGTLHLQNSFNISEHLNINEHTGSISSELESLKVNLNIFLLGAAGRKNLQDFAACGIDRMNYDSYLAQTGKSPAGVNLLSFAYDLEAKANSLPPGNLRNSLKRDAQTIKTIHQQRVLPIEQSLSTLYQSVKILQRTGNGLLERVTRILASLDFAQNFITNNTSSVIIEETKKYGRTIIGYFEHYLQWIEFSISEKVASCKPVATALDTAVDVFLCSYIIDPLNLFWFGIGKATVFLLPALIFAVKLAKYYRRMDSEDVYDDPSQH

SEQ ID NO: 19298 - protein, 464 aa, Artificial Sequence
  Synthetic polypeptide
AQEQHGIKRVLNSIGSDIDNVTQRLPIQDILSAFSVYVNNTESYIHRNLPTLEEYDSYWWLGGLVICSLLTLIVIFYYLGLLCGVCGYDRHATPTTRGCVSNTGGVFLMVGVGLSFLFCWILMIIVVLTFVFGANVEKLICEPYTSKELFRVLDTPYLLNEDWEYYLSGKLFNKSKMKLTFEQVYSDCKKNRGTYGTLHLQNSFNISEHLNINEHTGSISSELESLKVNLNIFLLGAAGRKNLQDFAACGIDRMNYDSYLAQTGKSPAGVNLLSFAYDLEAKANSLPPGNLRNSLKRDAQTIKTIHQQRVLPIEQSLSTLYQSVKILQRTGNGLLERVTRILASLDFAQNFITNNTSSVIIEETKKYGRTIIGYFEHYLQWIEFSISEKVASCKPVATALDTAVDVFLCSYIIDPLNLFWFGIGKATVFLLPALIFAVKLAKYYRRMDSEDVYDDSSWVTSVQC

SEQ ID NO: 19299 - protein, 490 aa, Artificial Sequence
  Synthetic polypeptide
AQEQHGIKRVLNSIGSDIDNVTQRLPIQDILSAFSVYVNNTESYIHRNLPTLEEYDSYWWLGGLVICSLLTLIVIFYYLGLLCGVCGYDRHATPTTRGCVSNTGGVFLMVGVGLSFLFCWILMIIVVLTFVFGANVEKLICEPYTSKELFRVLDTPYLLNEDWEYYLSGKLFNKSKMKLTFEQVYSDCKKNRGTYGTLHLQNSFNISEHLNINEHTGSISSELESLKVNLNIFLLGAAGRKNLQDFAACGIDRMNYDSYLAQTGKSPAGVNLLSFAYDLEAKANSLPPGNLRNSLKRDAQTIKTIHQQRVLPIEQSLSTLYQSVKILQRTGNGLLERVTRILASLDFAQNFITNNTSSVIIEETKKYGRTIIGYFEHYLQWIEFSISEKVASCKPVATALDTAVDVFLCSYIIDPLNLFWFGIGKATVFLLPALIFAVKLAKYYRRMDSEDVYDDVETIPMKNMENGNNGYHKDHVYGIHNPVMTSPSQH

SEQ ID NO: 19300 - protein, 467 aa, Artificial Sequence
  Synthetic polypeptide
AQEQHGIKRVLNSIGSDIDNVTQRLPIQDILSAFSVYVNNTESYIHRNLPTLEEYDSYWWLGGLVICSLLTLIVIFYYLGLLCGVCGYDRHATPTTRGCVSNTGGVFLMVGVGLSFLFCWILMIIVVLTFVFGANVEKLICEPYTSKELFRVLDTPYLLNEDWEYYLSGKLFNKSKMKLTFEQVYSDCKKNRGTYGTLHLQNSFNISEHLNINEHTGSISSELESLKVNLNIFLLGAAGRKNLQDFAACGIDRMNYDSYLAQTGKSPAGVNLLSFAYDLEAKANSLPPGNLRNSLKRDAQTIKTIHQQRVLPIEQSLSTLYQSVKILQRTGNGLLERVTRILASLDFAQNFITNNTSSVIIEETKKYGRTIIGYFEHYLQWIEFSISEKVASCKPVATALDTAVDVFLCSYIIDPLNLFWFGIGKATVFLLPALIFAVKLAKYYRRMDSEDVYDDVETIPMKNPSQH

SEQ ID NO: 19301 - protein, 33 aa, Artificial Sequence
  Synthetic polypeptide
GRVWWLTAIIPALWEAEAGGYLEPRSNMVSKGS

SEQ ID NO: 19302 - protein, 51 aa, Artificial Sequence
  Synthetic polypeptide
SQHFGRLRQEDILSPGATWYQKGLEFHWFRYRQCNSASSYSGYTLSILCLC

SEQ ID NO: 19303 - protein, 19 aa, Artificial Sequence
  Synthetic polypeptide
GQARWLTPVTPVLWEAKIL

SEQ ID NO: 19304 - protein, 773 aa, Artificial Sequence
  Synthetic polypeptide
PGTVAHACNPSALGGQDTLRKFLQKAYESKIDYDKIVYYEAGIILCCVLGLLFIILMPLVGYFFCMCRCCNKCGGEMHQRQKENGPFLRKCFAISLLVICIIISIGIFYGFVANHQVRTRIKRSRKLADSNFKDLRTLLNETPEQIKYILAQYNTTKDKAFTDLNSINSVLGGGILDRLRPNIIPVLDEIKSMATAIKETKEALENMNSTLKSLHQQSTQLSSSLTSVKTSLRSSLNDPLCLVHPSSETCNSIRLSLSQLNSNPELRQLPPVDAELDNVNNVLRTDLDGLVQQGYQSLNDIPDRVQRQTTTVVAGIKRVLNSIGSDIDNVTQRLPIQDILSAFSVYVNNTESYIHRNLPTLEEYDSYWWLGGLVICSLLTLIVIFYYLGLLCGVCGYDRHATPTTRGCVSNTGGVFLMVGVGLSFLFCWILMIIVVLTFVFGANVEKLICEPYTSKELFRVLDTPYLLNEDWEYYLSGKLFNKSKMKLTFEQVYSDCKKNRGTYGTLHLQNSFNISEHLNINEHTGSISSELESLKVNLNIFLLGAAGRKNLQDFAACGIDRMNYDSYLAQTGKSPAGVNLLSFAYDLEAKANSLPPGNLRNSLKRDAQTIKTIHQQRVLPIEQSLSTLYQSVKILQRTGNGLLERVTRILASLDFAQNFITNNTSSVIIEETKKYGRTIIGYFEHYLQWIEFSISEKVASCKPVATALDTAVDVFLCSYIIDPLNLFWFGIGKATVFLLPALIFAVKLAKYYRRMDSEDVYDDSSWVTSVQC

SEQ ID NO: 19305 - protein, 799 aa, Artificial Sequence
  Synthetic polypeptide
PGTVAHACNPSALGGQDTLRKFLQKAYESKIDYDKIVYYEAGIILCCVLGLLFIILMPLVGYFFCMCRCCNKCGGEMHQRQKENGPFLRKCFAISLLVICIIISIGIFYGFVANHQVRTRIKRSRKLADSNFKDLRTLLNETPEQIKYILAQYNTTKDKAFTDLNSINSVLGGGILDRLRPNIIPVLDEIKSMATAIKETKEALENMNSTLKSLHQQSTQLSSSLTSVKTSLRSSLNDPLCLVHPSSETCNSIRLSLSQLNSNPELRQLPPVDAELDNVNNVLRTDLDGLVQQGYQSLNDIPDRVQRQTTTVVAGIKRVLNSIGSDIDNVTQRLPIQDILSAFSVYVNNTESYIHRNLPTLEEYDSYWWLGGLVICSLLTLIVIFYYLGLLCGVCGYDRHATPTTRGCVSNTGGVFLMVGVGLSFLFCWILMIIVVLTFVFGANVEKLICEPYTSKELFRVLDTPYLLNEDWEYYLSGKLFNKSKMKLTFEQVYSDCKKNRGTYGTLHLQNSFNISEHLNINEHTGSISSELESLKVNLNIFLLGAAGRKNLQDFAACGIDRMNYDSYLAQTGKSPAGVNLLSFAYDLEAKANSLPPGNLRNSLKRDAQTIKTIHQQRVLPIEQSLSTLYQSVKILQRTGNGLLERVTRILASLDFAQNFITNNTSSVIIEETKKYGRTIIGYFEHYLQWIEFSISEKVASCKPVATALDTAVDVFLCSYIIDPLNLFWFGIGKATVFLLPALIFAVKLAKYYRRMDSEDVYDDVETIPMKNMENGNNGYHKDHVYGIHNPVMTSPSQH

SEQ ID NO: 19306 - protein, 777 aa, Artificial Sequence
  Synthetic polypeptide
PGTVAHACNPSALGGQDTLRKFLQKAYESKIDYDKPETVILGLKIVYYEAGIILCCVLGLLFIILMPLVGYFFCMCRCCNKCGGEMHQRQKENGPFLRKCFAISLLVICIIISIGIFYGFVANHQVRTRIKRSRKLADSNFKDLRTLLNETPEQIKYILAQYNTTKDKAFTDLNSINSVLGGGILDRLRPNIIPVLDEIKSMATAIKETKEALENMNSTLKSLHQQSTQLSSSLTSVKTSLRSSLNDPLCLVHPSSETCNSIRLSLSQLNSNPELRQLPPVDAELDNVNNVLRTDLDGLVQQGYQSLNDIPDRVQRQTTTVVAGIKRVLNSIGSDIDNVTQRLPIQDILSAFSVYVNNTESYIHRNLPTLEEYDSYWWLGGLVICSLLTLIVIFYYLGLLCGVCGYDRHATPTTRGCVSNTGGVFLMVGVGLSFLFCWILMIIVVLTFVFGANVEKLICEPYTSKELFRVLDTPYLLNEDWEYYLSGKLFNKSKMKLTFEQVYSDCKKNRGTYGTLHLQNSFNISEHLNINEHTGSISSELESLKVNLNIFLLGAAGRKNLQDFAACGIDRMNYDSYLAQTGKSPAGVNLLSFAYDLEAKANSLPPGNLRNSLKRDAQTIKTIHQQRVLPIEQSLSTLYQSVKILQRTGNGLLERVTRILASLDFAQNFITNNTSSVIIEETKKYGRTIIGYFEHYLQWIEFSISEKVASCKPVATALDTAVDVFLCSYIIDPLNLFWFGIGKATVFLLPALIFAVKLAKYYRRMDSEDVYDDPSQH

SEQ ID NO: 19307 - protein, 808 aa, Artificial Sequence
  Synthetic polypeptide
PGTVAHACNPSALGGQDTLRKFLQKAYESKIDYDKPETVILGLKIVYYEAGIILCCVLGLLFIILMPLVGYFFCMCRCCNKCGGEMHQRQKENGPFLRKCFAISLLVICIIISIGIFYGFVANHQVRTRIKRSRKLADSNFKDLRTLLNETPEQIKYILAQYNTTKDKAFTDLNSINSVLGGGILDRLRPNIIPVLDEIKSMATAIKETKEALENMNSTLKSLHQQSTQLSSSLTSVKTSLRSSLNDPLCLVHPSSETCNSIRLSLSQLNSNPELRQLPPVDAELDNVNNVLRTDLDGLVQQGYQSLNDIPDRVQRQTTTVVAGIKRVLNSIGSDIDNVTQRLPIQDILSAFSVYVNNTESYIHRNLPTLEEYDSYWWLGGLVICSLLTLIVIFYYLGLLCGVCGYDRHATPTTRGCVSNTGGVFLMVGVGLSFLFCWILMIIVVLTFVFGANVEKLICEPYTSKELFRVLDTPYLLNEDWEYYLSGKLFNKSKMKLTFEQVYSDCKKNRGTYGTLHLQNSFNISEHLNINEHTGSISSELESLKVNLNIFLLGAAGRKNLQDFAACGIDRMNYDSYLAQTGKSPAGVNLLSFAYDLEAKANSLPPGNLRNSLKRDAQTIKTIHQQRVLPIEQSLSTLYQSVKILQRTGNGLLERVTRILASLDFAQNFITNNTSSVIIEETKKYGRTIIGYFEHYLQWIEFSISEKVASCKPVATALDTAVDVFLCSYIIDPLNLFWFGIGKATVFLLPALIFAVKLAKYYRRMDSEDVYDDVETIPMKNMENGNNGYHKDHVYGIHNPVMTSPSQH

SEQ ID NO: 19308 - protein, 785 aa, Artificial Sequence
  Synthetic polypeptide
PGTVAHACNPSALGGQDTLRKFLQKAYESKIDYDKPETVILGLKIVYYEAGIILCCVLGLLFIILMPLVGYFFCMCRCCNKCGGEMHQRQKENGPFLRKCFAISLLVICIIISIGIFYGFVANHQVRTRIKRSRKLADSNFKDLRTLLNETPEQIKYILAQYNTTKDKAFTDLNSINSVLGGGILDRLRPNIIPVLDEIKSMATAIKETKEALENMNSTLKSLHQQSTQLSSSLTSVKTSLRSSLNDPLCLVHPSSETCNSIRLSLSQLNSNPELRQLPPVDAELDNVNNVLRTDLDGLVQQGYQSLNDIPDRVQRQTTTVVAGIKRVLNSIGSDIDNVTQRLPIQDILSAFSVYVNNTESYIHRNLPTLEEYDSYWWLGGLVICSLLTLIVIFYYLGLLCGVCGYDRHATPTTRGCVSNTGGVFLMVGVGLSFLFCWILMIIVVLTFVFGANVEKLICEPYTSKELFRVLDTPYLLNEDWEYYLSGKLFNKSKMKLTFEQVYSDCKKNRGTYGTLHLQNSFNISEHLNINEHTGSISSELESLKVNLNIFLLGAAGRKNLQDFAACGIDRMNYDSYLAQTGKSPAGVNLLSFAYDLEAKANSLPPGNLRNSLKRDAQTIKTIHQQRVLPIEQSLSTLYQSVKILQRTGNGLLERVTRILASLDFAQNFITNNTSSVIIEETKKYGRTIIGYFEHYLQWIEFSISEKVASCKPVATALDTAVDVFLCSYIIDPLNLFWFGIGKATVFLLPALIFAVKLAKYYRRMDSEDVYDDVETIPMKNPSQH

SEQ ID NO: 19309 - protein, 18 aa, Artificial Sequence
  Synthetic polypeptide
PQCFGRPRYFEKILTEGI

SEQ ID NO: 19310 - protein, 39 aa, Artificial Sequence; identical to SEQ ID NO: 5831
  Synthetic polypeptide

SEQ ID NO: 19311 - protein, 440 aa, Artificial Sequence; identical to SEQ ID NO: 2158
  Synthetic polypeptide

SEQ ID NO: 19312 - protein, 455 aa, Artificial Sequence; identical to SEQ ID NO: 2126
  Synthetic polypeptide

SEQ ID NO: 19313 - protein, 52 aa, Artificial Sequence; identical to SEQ ID NO: 5082
  Synthetic polypeptide

SEQ ID NO: 19314 - protein, 41 aa, Artificial Sequence
  Synthetic polypeptide
PLQTSNLQAIKASLPCSPCRLPISSTLHSIIHPSLLSTETP

SEQ ID NO: 19315 - protein, 33 aa, Artificial Sequence
  Synthetic polypeptide
RTSNSDLDLPDPCKLATCKQSRPVYPAALAAFP

SEQ ID NO: 19316 - protein, 46 aa, Artificial Sequence
  Synthetic polypeptide
CCNIPSTQQSNLQAIKASLPCSPCRLPISSTLHSIIHPSLLSTETP

SEQ ID NO: 19317 - protein, 44 aa, Artificial Sequence
  Synthetic polypeptide
FFFLEKLTAGAMSVWFNAVTFQAHSKATCKQSRPVYPAALAAFP

SEQ ID NO: 19318 - protein, 160 aa, Artificial Sequence
  Synthetic polypeptide
HSKHTAKQPASNQGQSTLQPLPPSHKQHSAQHHPSITSLNRNSLTNRRNQSPAPPAALPAELQTTPESVQLQDSWVLGSNVPLESRHFLFKTGTGTTPLFSTATPGYTMASGSVYSPPTRPLPRNTLSRSAFKFKKSSKYCSWKCTALCAVGVSVLLAIL

SEQ ID NO: 19319 - protein, 2535 aa, Artificial Sequence
  Synthetic polypeptide
HSKHTAKQPASNQGQSTLQPLPPSHKQHSAQHHPSITSLNRNSLTNRRNQSPAPPAALPAELQTTPESVQLQDSWVLGSNVPLESRHFLFKTGTGTTPLFSTATPGYTMASGSVYSPPTRPLPRNTLSRSAFKFKKSSKYCSWKCTALCAVGVSVLLAILLSYFIAMHLFGLNWQLQQTENDTFENGKVNSDTMPTNTVSLPSGDNGKLGGFTQENNTIDSGELDIGRRAIQEIPPGIFWRSQLFIDQPQFLKFNISLQKDALIGVYGRKGLPPSHTQYDFVELLDGSRLIAREQRSLLETERAGRQARSVSLHEAGFIQYLDSGIWHLAFYNDGKNAEQVSFNTIVIESVVECPRNCHGNGECVSGTCHCFPGFLGPDCSRAACPVLCSGNGQYSKGRCLCFSGWKGTECDVPTTQCIDPQCGGRGICIMGSCACNSGYKGESCEEADCIDPGCSNHGVCIHGECHCSPGWGGSNCEILKTMCPDQCSGHGTYLQESGSCTCDPNWTGPDCSNEICSVDCGSHGVCMGGTCRCEEGWTGPACNQRACHPRCAEHGTCKDGKCECSQGWNGEHCTIEGCPGLCNSNGRCTLDQNGWHCVCQPGWRGAGCDVAMETLCTDSKDNEGDGLIDCMDPDCCLQSSCQNQPYCRGLPDPQDIISQSLQSPSQQAAKSFYDRISFLIGSDSTHVIPGESPFNKSLASVIRGQVLTADGTPLIGVNVSFFHYPEYGYTITRQDGMFDLVANGGASLTLVFERSPFLTQYHTVWIPWNVFYVMDTLVMKKEENDIPSCDLSGFVRPNPIIVSSPLSTFFRSSPEDSPIIPETQVLHEETTIPGTDLKLSYLSSRAAGYKSVLKITMTQSIIPFNLMKVHLMVAVVGRLFQKWFPASPNLAYTFIWDKTDAYNQKVYGLSEAVVSVGYEYESCLDLTLWEKRTAILQGYELDASNMGGWTLDKHHVLDVQNGILYKGNGENQFISQQPPVVSSIMGNGRRRSISCPSCNGQADGNKLLAPVALACGIDGSLYVGDFNYVRRIFPSGNVTSVLELSSNPAHRYYLATDPVTGDLYVSDTNTRRIYRPKSLTGAKDLTKNAEVVAGTGEQCLPFDEARCGDGGKAVEATLMSPKGMAVDKNGLIYFVDGTMIRKVDQNGIISTLLGSNDLTSARPLTCDTSMHISQVRLEWPTDLAINPMDNSIYVLDNNVVLQITENRQVRIAAGRPMHCQVPGVEYPVGKHAVQTTLESATAIAVSYSGVLYITETDEKKINRIRQVTTDGEISLVAGIPSECDCKNDANCDCYQSGDGYAKDAKLSAPSSLAASPDGTLYIADLGNIRIRAVSKNKPLLNSMNFYEVASPTDQELYIFDINGTHQYTVSLVTGDYLYNFSYSNDNDITAVTDSNGNTLRIRRDPNRMPVRVVSPDNQVIWLTIGTNGCLKSMTAQGLELVLFTYHGNSGLLATKSDETGWTTFFDYDSEGRLTNVTFPTGVVTNLHGDMDKAITVDIESSSREEDVSITSNLSSIDSFYTMVQDQLRNSYQIGYDGSLRIIYASGLDSHYQTEPHVLAGTANPTVAKRNMTLPGENGQNLVEWRFRKEQAQGKVNVFGRKLRVNGRNLLSVDFDRTTKTEKIYDDHRKFLLRIAYDTSGHPTLWLPSSKLMAVNVTYSSTGQIASIQRGTTSEKVDYDGQGRIVSRVFADGKTWSYTYLEKSMVLLLHSQRQYIFEYDMWDRLSAITMPSVARHTMQTIRSIGYYRNIYNPPESNASIITDYNEEGLLLQTAFLGTSRRVLFKYRRQTRLSEILYDSTRVSFTYDETAGVLKTVNLQSDGFICTIRYRQIGPLIDRQIFRFSEDGMVNARFDYSYDNSFRVTSMQGVINETPLPIDLYQFDDISGKVEQFGKFGVIYYDINQIISTAVMTYTKHFDAHGRIKEIQYEIFRSLMYWITIQYDNMGRVTKREIKIGPFANTTKYAYEYDVDGQLQTVYLNEKIMWRYNYDLNGNLHLLNPSNSARLTPLRYDLRDRITRLGDVQYRLDEDGFLRQRGTEIFEYSSKGLLTRVYSKGSGWTVIYRYDGLGRRVSSKTSLGQHLQFFYADLTYPTRITHVYNHSSSEITSLYYDLQGHLFAMEISSGDEFYIASDNTGTPLAVFSSNGLMLKQIQYTAYGEIYFDSNIDFQLVIGFHGGLYDPLTKLIHFGERDYDILAGRWTTPDIEIWKRIGKDPAPFNLYMFRNNNPASKIHDVKDYITDVNSWLVTFGFHLHNAIPGFPVPKFDLTEPSYELVKSQQWDDIPPIFGVQQQVARQAKAFLSLGKMAEVQVSRRRAGGAQSWLWFATVKSLIGKGVMLAVSQGRVQTNVLNIANEDCIKVAAVLNNAFYLENLHFTIEGKDTHYFIKTTTPESDLGTLRLTSGRKALENGINVTVSQSTTVVNGRTRRFADVEMQFGALALHVRYGMTLDEEKARILEQARQRALARAWAREQQRVRDGEEGARLWTEGEKRQLLSAGKVQGYDGYYVLSVEQYPELADSANNIQFLRQSEIGRR

SEQ ID NO: 19320 - protein, 49 aa, Artificial Sequence
  Synthetic polypeptide
DLDGAIVFLTLQSNLQAIKASLPCSPCRLPISSTLHSIIHPSLLSTETP

SEQ ID NO: 19321 - protein, 165 aa, Artificial Sequence
  Synthetic polypeptide
PGWGNSISHITEQPASNQGQSTLQPLPPSHKQHSAQHHPSITSLNRNSLTNRRNQSPAPPAALPAELQTTPESVQLQDSWVLGSNVPLESRHFLFKTGTGTTPLFSTATPGYTMASGSVYSPPTRPLPRNTLSRSAFKFKKSSKYCSWKCTALCAVGVSVLLAIL

SEQ ID NO: 19322 - protein, 2540 aa, Artificial Sequence
  Synthetic polypeptide
PGWGNSISHITEQPASNQGQSTLQPLPPSHKQHSAQHHPSITSLNRNSLTNRRNQSPAPPAALPAELQTTPESVQLQDSWVLGSNVPLESRHFLFKTGTGTTPLFSTATPGYTMASGSVYSPPTRPLPRNTLSRSAFKFKKSSKYCSWKCTALCAVGVSVLLAILLSYFIAMHLFGLNWQLQQTENDTFENGKVNSDTMPTNTVSLPSGDNGKLGGFTQENNTIDSGELDIGRRAIQEIPPGIFWRSQLFIDQPQFLKFNISLQKDALIGVYGRKGLPPSHTQYDFVELLDGSRLIAREQRSLLETERAGRQARSVSLHEAGFIQYLDSGIWHLAFYNDGKNAEQVSFNTIVIESVVECPRNCHGNGECVSGTCHCFPGFLGPDCSRAACPVLCSGNGQYSKGRCLCFSGWKGTECDVPTTQCIDPQCGGRGICIMGSCACNSGYKGESCEEADCIDPGCSNHGVCIHGECHCSPGWGGSNCEILKTMCPDQCSGHGTYLQESGSCTCDPNWTGPDCSNEICSVDCGSHGVCMGGTCRCEEGWTGPACNQRACHPRCAEHGTCKDGKCECSQGWNGEHCTIEGCPGLCNSNGRCTLDQNGWHCVCQPGWRGAGCDVAMETLCTDSKDNEGDGLIDCMDPDCCLQSSCQNQPYCRGLPDPQDIISQSLQSPSQQAAKSFYDRISFLIGSDSTHVIPGESPFNKSLASVIRGQVLTADGTPLIGVNVSFFHYPEYGYTITRQDGMFDLVANGGASLTLVFERSPFLTQYHTVWIPWNVFYVMDTLVMKKEENDIPSCDLSGFVRPNPIIVSSPLSTFFRSSPEDSPIIPETQVLHEETTIPGTDLKLSYLSSRAAGYKSVLKITMTQSIIPFNLMKVHLMVAVVGRLFQKWFPASPNLAYTFIWDKTDAYNQKVYGLSEAVVSVGYEYESCLDLTLWEKRTAILQGYELDASNMGGWTLDKHHVLDVQNGILYKGNGENQFISQQPPVVSSIMGNGRRRSISCPSCNGQADGNKLLAPVALACGIDGSLYVGDFNYVRRIFPSGNVTSVLELSSNPAHRYYLATDPVTGDLYVSDTNTRRIYRPKSLTGAKDLTKNAEVVAGTGEQCLPFDEARCGDGGKAVEATLMSPKGMAVDKNGLIYFVDGTMIRKVDQNGIISTLLGSNDLTSARPLTCDTSMHISQVRLEWPTDLAINPMDNSIYVLDNNVVLQITENRQVRIAAGRPMHCQVPGVEYPVGKHAVQTTLESATAIAVSYSGVLYITETDEKKINRIRQVTTDGEISLVAGIPSECDCKNDANCDCYQSGDGYAKDAKLSAPSSLAASPDGTLYIADLGNIRIRAVSKNKPLLNSMNFYEVASPTDQELYIFDINGTHQYTVSLVTGDYLYNFSYSNDNDITAVTDSNGNTLRIRRDPNRMPVRVVSPDNQVIWLTIGTNGCLKSMTAQGLELVLFTYHGNSGLLATKSDETGWTTFFDYDSEGRLTNVTFPTGVVTNLHGDMDKAITVDIESSSREEDVSITSNLSSIDSFYTMVQDQLRNSYQIGYDGSLRIIYASGLDSHYQTEPHVLAGTANPTVAKRNMTLPGENGQNLVEWRFRKEQAQGKVNVFGRKLRVNGRNLLSVDFDRTTKTEKIYDDHRKFLLRIAYDTSGHPTLWLPSSKLMAVNVTYSSTGQIASIQRGTTSEKVDYDGQGRIVSRVFADGKTWSYTYLEKSMVLLLHSQRQYIFEYDMWDRLSAITMPSVARHTMQTIRSIGYYRNIYNPPESNASIITDYNEEGLLLQTAFLGTSRRVLFKYRRQTRLSEILYDSTRVSFTYDETAGVLKTVNLQSDGFICTIRYRQIGPLIDRQIFRFSEDGMVNARFDYSYDNSFRVTSMQGVINETPLPIDLYQFDDISGKVEQFGKFGVIYYDINQIISTAVMTYTKHFDAHGRIKEIQYEIFRSLMYWITIQYDNMGRVTKREIKIGPFANTTKYAYEYDVDGQLQTVYLNEKIMWRYNYDLNGNLHLLNPSNSARLTPLRYDLRDRITRLGDVQYRLDEDGFLRQRGTEIFEYSSKGLLTRVYSKGSGWTVIYRYDGLGRRVSSKTSLGQHLQFFYADLTYPTRITHVYNHSSSEITSLYYDLQGHLFAMEISSGDEFYIASDNTGTPLAVFSSNGLMLKQIQYTAYGEIYFDSNIDFQLVIGFHGGLYDPLTKLIHFGERDYDILAGRWTTPDIEIWKRIGKDPAPFNLYMFRNNNPASKIHDVKDYITDVNSWLVTFGFHLHNAIPGFPVPKFDLTEPSYELVKSQQWDDIPPIFGVQQQVARQAKAFLSLGKMAEVQVSRRRAGGAQSWLWFATVKSLIGKGVMLAVSQGRVQTNVLNIANEDCIKVAAVLNNAFYLENLHFTIEGKDTHYFIKTTTPESDLGTLRLTSGRKALENGINVTVSQSTTVVNGRTRRFADVEMQFGALALHVRYGMTLDEEKARILEQARQRALARAWAREQQRVRDGEEGARLWTEGEKRQLLSAGKVQGYDGYYVLSVEQYPELADSANNIQFLRQSEIGRR

SEQ ID NO: 19323 - protein, 24 aa, Artificial Sequence
  Synthetic polypeptide
YFSHYRATCKQSRPVYPAALAAFP

SEQ ID NO: 19324 - protein, 9 aa, Artificial Sequence
  Synthetic polypeptide
GLPSHVELA

SEQ ID NO: 19325 - protein, 116 aa, Artificial Sequence
  Synthetic polypeptide
MGIPLHKLSCLLSCKMPFAFCHDCEASPAMWNWRDSQSPDSAKGFRSVRPNLQDKRSPTQLGNQNLPASVLEVNASQTHRQTTPEASPPCPPSVVPLNRATFSPGSGTSSASLSLP

SEQ ID NO: 19326 - protein, 73 aa, Artificial Sequence
  Synthetic polypeptide
MGIPLHKLSCLLSCKMPFAFCHDCEASPAMWNWRDSQSPDSAKGFRSVRPNLQDKRSPTQSQITVNGNSGGAV

SEQ ID NO: 19327 - protein, 112 aa, Artificial Sequence
  Synthetic polypeptide
MGIPLHKLSCLLSCKMPFAFCHDCEASPAMWNWRDSQSPDSAKGFRSVRPNLQDKRSPTQSQITVNGNSGGAVSPMSYYQRPFSPSAYSLPASLNSSIVMQHGTSLDSTDTY

SEQ ID NO: 19328 - protein, 148 aa, Artificial Sequence
  Synthetic polypeptide
MGIPLHKLSCLLSCKMPFAFCHDCEASPAMWNWRDSQSPDSAKGFRSVRPNLQDKRSPTQSQITVNGNSGGAVSPMSYYQRPFSPSAYSLPASLNSSIVMQHGTSLDSTDTYPQHAQSLDGTTSSSIPLYRSSEEEKRVTVIKAPHYP

SEQ ID NO: 19329 - protein, 665 aa, Artificial Sequence
  Synthetic polypeptide
MGIPLHKLSCLLSCKMPFAFCHDCEASPAMWNWRDSQSPDSAKGFRSVRPNLQDKRSPTQSQITVNGNSGGAVSPMSYYQRPFSPSAYSLPASLNSSIVMQHGTSLDSTDTYPQHAQSLDGTTSSSIPLYRSSEEEKRVTVIKAPHYPGIGPVDESGIPTAIRTTVDRPKDWYKTMFKQIHMVHKPDDDTDMYNTPYTYNAGLYNPPYSAQSHPAAKTQTYRPLSKSHSDNSPNAFKDASSPVPPPHVPPPVPPLRPRDRSSTEKHDWDPPDRKVDTRKFRSEPRSIFEYEPGKSSILQHERPPPLPTTPTPVPREPGRKPLSSSRLGEVTGSPSPPPRSGAPTPSSRAPALSPTRPPKKPLDYVQDHSSGVFNEASLYQSSIDRSLERPMSSASMASDFRKRRKSEPAVGPPRGLGDQSASRTSPGRVDLPGSSTTLTKSFTSSSPSSPSRAKDRESPRSYSSTLTDMGRSAPRERRGTPEKEKLPAKAVYDFKAQTSKELSFKKGDTVYILRKIDQNWYEGEHHGRVGIFPISYVEKLTPPEKAQPARPPPPAQPGEIGEAIAKYNFNADTNVELSLRKGDRVILLKRVDQNWYEGKIPGTNRQGIFPVSYVEVVKKNTKGAEDYPDPPIPHSYSSDRIHSLSSNKPQRPVFTHENIQGGGEP

SEQ ID NO: 19330 - protein, 695 aa, Artificial Sequence
  Synthetic polypeptide
MGIPLHKLSCLLSCKMPFAFCHDCEASPAMWNWRDSQSPDSAKGFRSVRPNLQDKRSPTQSQITVNGNSGGAVSPMSYYQRPFSPSAYSLPASLNSSIVMQHGTSLDSTDTYPQHAQSLDGTTSSSIPLYRSSEEEKRVTVIKAPHYPGIGPVDESGIPTAIRTTVDRPKDWYKTMFKQIHMVHKPDDDTDMYNTPYTYNAGLYNPPYSAQSHPAAKTQTYRPLSKSHSDNSPNAFKDASSPVPPPHVPPPVPPLRPRDRSSTEKHDWDPPDRKVDTRKFRSEPRSIFEYEPGKSSILQHERPTDRINPDDIDLENEPWYKFFSELEFGRPPPKKPLDYVQDHSSGVFNEASLYQSSIDRSLERPMSSASMASDFRKRRKSEPAVGPPRGLGDQSASRTSPGRVDLPGSSTTLTKSFTSSSPSSPSRAKDRESPRSYSSTLTDMGRSAPRERRGTPEKEKLPAKAVYDFKAQTSKELSFKKGDTVYILRKIDQNWYEGEHHGRVGIFPISYVEKLTPPEKAQPARPPPPAQPGEIGEAIAKYNFNADTNVELSLRKGDRVILLKRVDQNWYEGKIPGTNRQGIFPVSYVEVVKKNTKGAEDYPDPPIPHSYSSDRIHSLSSNKPQRPVFTHENIQGGGEPFQALYNYTPRNEDELELRESDVIDVMEKCDDGWFVGTSRRTKFFGTFPGNYVKRL

SEQ ID NO: 19331 - protein, 82 aa, Artificial Sequence
  Synthetic polypeptide
MGIPLHKLSCLLSCKMPFAFCHDCEASPAMWNWRDSQSPDSAWRSYNDGNQETLNGDATYSSLAAKGFRSVRPNLQDKRSPT

SEQ ID NO: 19332 - protein, 83 aa, Artificial Sequence
  Synthetic polypeptide
MGIPLHKLSCLLSCKMPFAFCHDCEASPAMWNWRDSQSPDSAWRSYNDGNQETLNGDATYSSLAAKGFRSVRPNLQDKRSPTQ

SEQ ID NO: 19333 - protein, 180 aa, Artificial Sequence
  Synthetic polypeptide
MGIPLHKLSCLLSCKMPFAFCHDCEASPAMWNWRDSQSPDSAWRSYNDGNQETLNGDATYSSLAAKGFRSVRPNLQDKRSPTQAPPPPERKESFHSSLITSHTKGVILDQLVTNTQIPSSTEYFANKKPLQGTMYSNEDSRQTIVYSEESNTTMSYTQKITNPLPAASSTDPAPFANINT

SEQ ID NO: 19334 - protein, 114 aa, Artificial Sequence
  Synthetic polypeptide
MGIPLHKLSCLLSCKMPFAFCHDCEASPAMWNWRDSQSPDSAWRSYNDGNQETLNGDATYSSLAAKGFRSVRPNLQDKRSPTQLGNQNLPASVLEVNASQTHRQTTPEASPPCP

SEQ ID NO: 19335 - protein, 85 aa, Artificial Sequence
  Synthetic polypeptide
MGIPLHKLSCLLSCKMPFAFCHDCEASPAMWNWRDSQSPDSAWRSYNDGNQETLNGDATYSSLAAKGFRSVRPNLQDKRSPTQSQ

SEQ ID NO: 19336 - protein, 92 aa, Artificial Sequence
  Synthetic polypeptide
MGIPLHKLSCLLSCKMPFAFCHDCEASPAMWNWRDSQSPDSAWRSYNDGNQETLNGDATYSSLAAKGFRSVRPNLQDKRSPTQSQITVNGNS

SEQ ID NO: 19337 - protein, 94 aa, Artificial Sequence
  Synthetic polypeptide
MGIPLHKLSCLLSCKMPFAFCHDCEASPAMWNWRDSQSPDSAWRSYNDGNQETLNGDATYSSLAAKGFRSVRPNLQDKRSPTQSQITVNGNSGG

SEQ ID NO: 19338 - protein, 105 aa, Artificial Sequence
  Synthetic polypeptide
MGIPLHKLSCLLSCKMPFAFCHDCEASPAMWNWRDSQSPDSAWRSYNDGNQETLNGDATYSSLAAKGFRSVRPNLQDKRSPTQSQITVNGNSGGAVSPMSYYQRP

SEQ ID NO: 19339 - protein, 111 aa, Artificial Sequence
  Synthetic polypeptide
MGIPLHKLSCLLSCKMPFAFCHDCEASPAMWNWRDSQSPDSAWRSYNDGNQETLNGDATYSSLAAKGFRSVRPNLQDKRSPTQSQITVNGNSGGAVSPMSYYQRPFSPSAY

SEQ ID NO: 19340 - protein, 128 aa, Artificial Sequence
  Synthetic polypeptide
MGIPLHKLSCLLSCKMPFAFCHDCEASPAMWNWRDSQSPDSAWRSYNDGNQETLNGDATYSSLAAKGFRSVRPNLQDKRSPTQSQITVNGNSGGAVSPMSYYQRPFSPSAYSLPASLNSSIVMQHGTS

SEQ ID NO: 19341 - protein, 138 aa, Artificial Sequence
  Synthetic polypeptide
MGIPLHKLSCLLSCKMPFAFCHDCEASPAMWNWRDSQSPDSAWRSYNDGNQETLNGDATYSSLAAKGFRSVRPNLQDKRSPTQSQITVNGNSGGAVSPMSYYQRPFSPSAYSLPASLNSSIVMQHGTSLDSTDTYPQH

SEQ ID NO: 19342 - protein, 149 aa, Artificial Sequence
  Synthetic polypeptide
MGIPLHKLSCLLSCKMPFAFCHDCEASPAMWNWRDSQSPDSAWRSYNDGNQETLNGDATYSSLAAKGFRSVRPNLQDKRSPTQSQITVNGNSGGAVSPMSYYQRPFSPSAYSLPASLNSSIVMQHGTSLDSTDTYPQHAQSLDGTTSSS

SEQ ID NO: 19343 - protein, 150 aa, Artificial Sequence
  Synthetic polypeptide
MGIPLHKLSCLLSCKMPFAFCHDCEASPAMWNWRDSQSPDSAWRSYNDGNQETLNGDATYSSLAAKGFRSVRPNLQDKRSPTQSQITVNGNSGGAVSPMSYYQRPFSPSAYSLPASLNSSIVMQHGTSLDSTDTYPQHAQSLDGTTSSSI

SEQ ID NO: 19344 - protein, 1198 aa, Artificial Sequence
  Synthetic polypeptide
MGIPLHKLSCLLSCKMPFAFCHDCEASPAMWNWRDSQSPDSAWRSYNDGNQETLNGDATYSSLAAKGFRSVRPNLQDKRSPTQSQITVNGNSGGAVSPMSYYQRPFSPSAYSLPASLNSSIVMQHGTSLDSTDTYPQHAQSLDGTTSSSIPLYRSSEEEKRVTVIKAPHYPGIGPVDESGIPTAIRTTVDRPKDWYKTMFKQIHMVHKPDDDTDMYNTPYTYNAGLYNPPYSAQSHPAAKTQTYRPLSKSHSDNSPNAFKDASSPVPPPHVPPPVPPLRPRDRSSTEKHDWDPPDRKVDTRKFRSEPRSIFEYEPGKSSILQHERPASLYQSSIDRSLERPMSSASMASDFRKRRKSEPAVGPPRGLGDQSASRTSPGRVDLPGSSTTLTKSFTSSSPSSPSRAKGGDDSKICPSLCSYSGLNGNPSSELDYCSTYRQHLDVPRDSPRAISFKNGWQMARQNAEIWSSTEETVSPKIKSRSCDDLLNDDCDSFPDPKVKSESMGSLLCEEDSKESCPMAWGSPYVPEVRSNGRSRIRHRSARNAPGFLKMYKKMHRINRKDLMNSEVICSVKSRILQYESEQQHKDLLRAWSQCSTEEVPRDMVPTRISEFEKLIQKSKSMPNLGDDMLSPVTLEPPQNGLCPKRRFSIEYLLEEENQSGPPARGRRGCQSNALVPIHIEVTSDEQPRAHVEFSDSDQDGVVSDHSDYIHLEGSSFCSESDFDHFSFTSSESFYGSSHHHHHHHHHHHRHLISSCKGRCPASYTRFTTMLKHERARHENTEEPRRQEMDPGLSKLAFLVSPVPFRRKKNSAPKKQTEKAKCKASVFEALDSALKDICDQIKAEKKRGSLPDNSILHRLISELLPDVPERNSSLRALRRSPLHQPLHPLPPDGAIHCPPYQNDCGRMPRSASFQDVDTANSSCHHQDRGGALQDRESPRSYSSTLTDMGRSAPRERRGTPEKEKLPAKAVYDFKAQTSKELSFKKGDTVYILRKIDQNWYEGEHHGRVGIFPISYVEKLTPPEKAQPARPPPPAQPGEIGEAIAKYNFNADTNVELSLRKGDRVILLKRVDQNWYEGKIPGTNRQGIFPVSYVEVVKKNTKGAEDYPDPPIPHSYSSDRIHSLSSNKPQRPVFTHENIQGGGEPFQALYNYTPRNEDELELRESDVIDVMEKCDDGWFVGTSRRTKFFGTFPGNYVKRL

SEQ ID NO: 19345 - protein, 690 aa, Artificial Sequence
  Synthetic polypeptide
MGIPLHKLSCLLSCKMPFAFCHDCEASPAMWNWRDSQSPDSAWRSYNDGNQETLNGDATYSSLAAKGFRSVRPNLQDKRSPTQSQITVNGNSGGAVSPMSYYQRPFSPSAYSLPASLNSSIVMQHGTSLDSTDTYPQHAQSLDGTTSSSIPLYRSSEEEKRVTVIKAPHYPGIGPVDESGIPTAIRTTVDRPKDWYKTMFKQIHMVHKPDDDTDMYNTPYTYNAGLYNPPYSAQSHPAAKTQTYRPLSKSHSDNSPNAFKDASSPVPPPHVPPPVPPLRPRDRSSTEKHDWDPPDRKVDTRKFRSEPRSIFEYEPGKSSILQHERPPPKKPLDYVQDHSSGVFNEASLYQSSIDRSLERPMSSASMASDFRKRRKSEPAVGPPRGLGDQSASRTSPGRVDLPGSSTTLTKSFTSSSPSSPSRAKDRESPRSYSSTLTDMGRSAPRERRGTPEKEKLPAKAVYDFKAQTSKELSFKKGDTVYILRKIDQNWYEGEHHGRVGIFPISYVEKLTPPEKAQPARPPPPAQPGEIGEAIAKYNFNADTNVELSLRKGDRVILLKRVDQNWYEGKIPGTNRQGIFPVSYVEVVKKNTKGAEDYPDPPIPHSYSSDRIHSLSSNKPQRPVFTHENIQGGGEPFQALYNYTPRNEDELELRESDVIDVMEKCDDGWFVGTSRRTKFFGTFPGNYVKRL

SEQ ID NO: 19346 - protein, 743 aa, Artificial Sequence
  Synthetic polypeptide
MGIPLHKLSCLLSCKMPFAFCHDCEASPAMWNWRDSQSPDSAWRSYNDGNQETLNGDATYSSLAAKGFRSVRPNLQDKRSPTQSQITVNGNSGGAVSPMSYYQRPFSPSAYSLPASLNSSIVMQHGTSLDSTDTYPQHAQSLDGTTSSSIPLYRSSEEEKRVTVIKAPHYPGIGPVDESGIPTAIRTTVDRPKDWYKTMFKQIHMVHKPDDDTDMYNTPYTYNAGLYNPPYSAQSHPAAKTQTYRPLSKSHSDNSPNAFKDASSPVPPPHVPPPVPPLRPRDRSSTEKHDWDPPDRKVDTRKFRSEPRSIFEYEPGKSSILQHERPPPLPTTPTPVPREPGRKPLSSSRLGEVTGSPSPPPRSGAPTPSSRAPALSPTRPPKKPLDYVQDHSSGVFNEASLYQSSIDRSLERPMSSASMASDFRKRRKSEPAVGPPRGLGDQSASRTSPGRVDLPGSSTTLTKSFTSSSPSSPSRAKDRESPRSYSSTLTDMGRSAPRERRGTPEKEKLPAKAVYDFKAQTSKELSFKKGDTVYILRKIDQNWYEGEHHGRVGIFPISYVEKLTPPEKAQPARPPPPAQPGEIGEAIAKYNFNADTNVELSLRKGDRVILLKRVDQNWYEGKIPGTNRQGIFPVSYVEVVKKNTKGAEDYPDPPIPHSYSSDRIHSLSSNKPQRPVFTHENIQGGGEPFQALYNYTPRNEDELELRESDVIDVMEKCDDGWFVGTSRRTKFFGTFPGNYVKRL

SEQ ID NO: 19347 - protein, 656 aa, Artificial Sequence
  Synthetic polypeptide
MGIPLHKLSCLLSCKMPFAFCHDCEASPAMWNWRDSQSPDSAWRSYNDGNQETLNGDATYSSLAAKGFRSVRPNLQDKRSPTQSQITVNGNSGGAVSPMSYYQRPFSPSAYSLPASLNSSIVMQHGTSLDSTDTYPQHAQSLDGTTSSSIPLYRSSEEEKRVTVIKAPHYPGIGPVDESGIPTAIRTTVDRPKDWYKTMFKQIHMVHKPGLYNPPYSAQSHPAAKTQTYRPLSKSHSDNSPNAFKDASSPVPPPHVPPPVPPLRPRDRSSTEKHDWDPPDRKVDTRKFRSEPRSIFEYEPGKSSILQHERPASLYQSSIDRSLERPMSSASMASDFRKRRKSEPAVGPPRGLGDQSASRTSPGRVDLPGSSTTLTKSFTSSSPSSPSRAKDRESPRSYSSTLTDMGRSAPRERRGTPEKEKLPAKAVYDFKAQTSKELSFKKGDTVYILRKIDQNWYEGEHHGRVGIFPISYVEKLTPPEKAQPARPPPPAQPGEIGEAIAKYNFNADTNVELSLRKGDRVILLKRVDQNWYEGKIPGTNRQGIFPVSYVEVVKKNTKGAEDYPDPPIPHSYSSDRIHSLSSNKPQRPVFTHENIQGGGEPFQALYNYTPRNEDELELRESDVIDVMEKCDDGWFVGTSRRTKFFGTFPGNYVKRL

SEQ ID NO: 19348 - protein, 57 aa, Artificial Sequence
  Synthetic polypeptide
WFYKWEFPCTSSLACCHVRCPLPSAMIVRPPQPCGTGVILSHQTQLGDLTMMAIRRH

SEQ ID NO: 19349 - protein, 66 aa, Artificial Sequence
  Synthetic polypeptide
WFYKWEFPCTSSLACCHVRCPLPSAMIVRPPQPCGTGVILSHQTQQKVLEAFDQTYKIKDHQLRAR

SEQ ID NO: 19350 - protein, 76 aa, Artificial Sequence
  Synthetic polypeptide
WFYKWEFPCTSSLACCHVRCPLPSAMIVRPPQPCGTGVILSHQTQQKVLEAFDQTYKIKDHQLSLEIRTYLPVCWR

SEQ ID NO: 19351 - protein, 11 aa, Artificial Sequence
  Synthetic polypeptide
ALFWEILEILL

SEQ ID NO: 19352 - protein, 3009 aa, Artificial Sequence
  Synthetic polypeptide
NATLVANLEQESEKAVKWQVSFVLGNIGNSFMIDPVLGSIKTAKELDRSNQAEYDLMVKATDKGSPPMSEITSVRIFVTIADNASPKFTSKEYSVELSETVSIGSFVGMVTAHSQSSVVYEIKDGNTGDAFDINPHSGTIITQKALDFETLPIYTLIIQGTNMAGLSTNTTVLVHLQDENDNAPVFMQAEYTGLISESASINSVVLTDRNVPLVIRAADADKDSNALLVYHIVEPSVHTYFAIDSSTGAIHTVLSLDYEETSIFHFTVQVHDMGTPRLFAEYAANVTVHVIDINDCPPVFAKPLYEASLLLPTYKGVKVITVNATDADSSAFSQLIYSITEGNIGEKFSMDYKTGALTVQNTTQLRSRYELTVRASDGRFAGLTSVKINVKESKESHLKFTQDVYSAVVKENSTEAETLAVITAIGNPINEPLFYHILNPDRRFKISRTSGVLSTTGTPFDREQQEAFDVVVEVTEEHKPSAVAHVVVKVIVEDQNDNAPVFVNLPYYAVVKVDTEVGHVIRYVTAVDRDSGRNGEVHYYLKEHHEHFQIGPLGEISLKKQFELDTLNKEYLVTVVAKDGGNPAFSAEVIVPITVMNKAMPVFEKPFYSAEIAESIQVHSPVVHVQANSPEGLKVFYSITDGDPFSQFTINFNTGVINVIAPLDFEAHPAYKLSIRATDSLTGAHAEVFVDIIVDDINDNPPVFAQQSYAVTLSEASVIGTSVVQVRATDSDSEPNRGISYQMFGNHSKSHDHFHVDSSTGLISLLRTLDYEQSRQHTIFVRAVDGGMPTLSSDVIVTVDVTDLNDNPPLFEQQIYEARISEHAPHGHFVTCVKAYDADSSDIDKLQYSILSGNDHKHFVIDSATGIITLSNLHRHALKPFYSLNLSVSDGVFRSSTQVHVTVIGGNLHSPAFLQNEYEVELAENAPLHTLVMEVKTTDGDSGIYGHVTYHIVNDFAKDRFYINERGQIFTLEKLDRETPAEKVISVRLMAKDAGGKVAFCTVNVILTDDNDNAPQFRATKYEVNIGSSAAKGTSVVKVLASDADEGSNADITYAIEADSESVKENLEINKLSGVITTKESLIGLENEFFTFFVRAVDNGSPSKESVVLVYVKILPPEMQLPKFSEPFYTFTVSEDVPIGTEIDLIRAEHSGTVLYSLVKGNTPESNRDESFVIDRQSGRLKLEKSLDHETTKWYQFSILARCTQDDHEMVASVDVSIQVKDANDNSPVFESSPYEAFIVENLPGGSRVIQIRASDADSGTNGQVMYSLDQSQSVEVIESFAINMETGWITTLKELDHEKRDNYQIKVVASDHGEKIQLSSTAIVDVTVTDVNDSPPRFTAEIYKGTVSEDDPQGGVIAILSTTDADSEEINRQVTYFITGGDPLGQFAVETIQNEWKVYVKKPLDREKRDNYLLTITATDGTFSSKAIVEVKVLDANDNSPVCEKTLYSDTIPEDVLPGKLIMQISATDADIRSNAEITYTLLGSGAEKFKLNPDTGELKTSTPLDREEQAVYHLLVRATDGGGRFCQASIVLTLEDVNDNAPEFSADPYAITVFENTEPGTLLTRVQATDADAGLNRKILYSLIDSADGQFSINELSGIIQLEKPLDRELQAVYTLSLKAVDQGLPRRLTATGTVIVSVLDINDNPPVFEYREYGATVSEDILVGTEVLQVYAASRDIEANAEITYSIISGNEHGKFSIDSKTGAVFIIENLDYESSHEYYLTVEATDGGTPSLSDVATVNVNVTDINDNTPVFSQDTYTTVISEDAVLEQSVITVMADDADGPSNSHIHYSIIDGNQGSSFTIDPVRGEVKVTKLLDRETISGYTLTVQASDNGSPPRVNTTTVNIDVSDVNDNAPVFSRGNYSVIIQENKPVGFSVLQLVVTDEDSSHNGPPFFFTIVTGNDEKAFEVNPQGVLLTSSAIKRKEKDHYLLQVKVADNGKPQLSSLTYIDIRVIEESIYPPAILPLEIFITSSGEEYSGGVIGKIHATDQDVYDTLTYSLDPQMDNLFSVSSTGGKLIAHKKLDIGQYLLNVSVTDGKFTTVADITVHIRQVTQEMLNHTIAIRFANLTPEEFVGDYWRNFQRALRNILGVRRNDIQIVSLQSSEPHPHLDVLLFVEKPGSAQISTKQLLHKINSSVTDIEEIIGVRILNVFQKLCAGLDCPWKFCDEKVSVDESVMSTHSTARLSFVTPRHHRAAVCLCKEGRCPPVHHGCEDDPCPEGSECVSDPWEEKHTCVCPSGRFGQCPGSSSMTLTGNSYVKYRLTENENKLEMKLTMRLRTYSTHAVVMYARGTDYSILEIHHGRLQYKFDCGSGPGIVSVQSIQVNDGQWHAVALEVNGNYARLVLDQVHTASGTAPGTLKTLNLDNYVFFGGHIRQQGTRHGRSPQVGNGFRGCMDSIYLNGQELPLNSKPRSYAHIEESVDVSPGCFLTATEDCASNPCQNGGVCNPSPAGGYYCKCSALYIGTHCEISVNPCSSKPCLYGGTCVVDNGGFVCQCRGLYTGQRCQLSPYCKDEPCKNGGTCFDSLDGAVCQCDSGFRGERCQSDIDECSGNPCLHGALCENTHGSYHCNCSHEYRGRHCEDAAPNQYVSTPWNIGLAEGIGIVVFVAGIFLLVVVFVLCRKMISRKKKHQAEPKDKHLGPATAFLQRPYFDSKLNKNIYSDIPPQVPVRPISYTPSIPSDSRNNLDRNSFEGSAIPEHPEFSTFNPESVHGHRKAVAVCSVAPNLPPPPPSNSPSDSDSIQKPSWDFDYDTKVVDLDPCLSKKPLEEKPSQPYSARESLSEVQSLSSFQSESCDDNGYHWDTSDWMPSVPLPDIQEFPNYEVIDEQTPLYSADPNAIDTDYYPGGYDIESDFPPPPEDFPAADELPPLPPEFSNQFESIHPPRDMPAAGSLGSSSRNRQRFNLNQYLPNFYPLDMSEPQTKGTGENSTCREPHAPYPPGYQRHFEAPAVESMPMSVYASTASCSDVSACCEVESEVMMSDYESGDDGHFEEVTIPPLDSQQHTEV

SEQ ID NO: 19353 - protein, 16 aa, Artificial Sequence
  Synthetic polypeptide
VASELCFGKYWKFFYD

SEQ ID NO: 19354 - protein, 168 aa, Artificial Sequence
  Synthetic polypeptide
IMEAVPPCCSRDKWECPSGVVNEETFKEIYSQFFPQGDSTTYAHFLFNAFDTDHNGAVSFEDFIKGLSILLRGTVQEKLNWAFNLYDINKDGYITKEEMLDIMKAIYDMMGKCTYPVLKEDAPRQHVETFFQKMDKNKDGVVTIDEFIESCQKDENIMRSMQLFENVI

SEQ ID NO: 19355 - protein, 89 aa, Artificial Sequence
  Synthetic polypeptide
MWLCFVPYPNLILNCNPHNPQVSRERAGGVIESWRQFPHAVLVISGNAPVVLLMKKPSKRFTRSSFHRETLQHMHIFCSMHLIQTTMEL

SEQ ID NO: 19356 - protein, 8 aa, Artificial Sequence
  Synthetic polypeptide
VGMPQWCC

SEQ ID NO: 19357 - protein, 781 aa, Artificial Sequence
  Synthetic polypeptide
ESLSKHAQRFGKAHSKVWHNYNTHFRPHQKGWLSITLGSHWIEPNRSENTMDIFKCQQSMVSVLGWFANPIHGDGDYPEGMRKKLFSVLPIFSEAEKHEMRGTADFFAFSFGPNNFKPLNTMAKMGQNVSLNLREALNWIKLEYNNPRILIAENGWFTDSRVKTEDTTAIYMMKNFLSQVLQAIRLDEIRVFGYTAWSLLDGFEWQDAYTIRRGLFYVDFNSKQKERKPKSSAHYYKQIIRENGFSLKESTPDVQGQFPCDFSWGVTESVLKPESVASSPQFSDPHLYVWNATGNRLLHRVEGVRLKTRPAQCTDFVNIKKQLEMLARMKVTHYRFALDWASVLPTGNLSAVNRQALRYYRCVVSEGLKLGISAMVTLYYPTHAHLGLPEPLLHADGWLNPSTAEAFQAYAGLCFQELGDLVKLWITINEPNRLSDIYNRSGNDTYGAAHNLLVAHALAWRLYDRQFRPSQRGAVSLSLHADWAEPANPYADSHWRAAERFLQFEIAWFAEPLFKTGDYPAAMREYIASKHRRGLSSSALPRLTEAERRLLKGTVDFCALNHFTTRFVMHEQLAGSRYDSDRDIQFLQDITRLSSPTRLAVIPWGVRKLLRWVRRNYGDMDIYITASGIDDQALEDDRLRKYYLGKYLQEVLKAYLIDKVRIKGYYAFKLAEEKSKPRFGFFTSDFKAKSSIQFYNKVISSRGFPFENSSSRCSQTQENTECTVCLFLVQKKPLIFLGCCFFSTLVLLLSIAIFQRQKRRKFWKAKNLQHIPLKKGKRVVS

SEQ ID NO: 19358 - protein, 14 aa, Artificial Sequence
  Synthetic polypeptide
TCTEVWEGSLESLA

SEQ ID NO: 19359 - protein, 77 aa, Artificial Sequence
  Synthetic polypeptide
VNMHRGLGRLTRKFGITTTHISAHIRRVGYRSRWDLIGSSQTGRKTRWIYSNVNNPWFLCLDGLPTLSMGMATIQRG

SEQ ID NO: 19360 - protein, 9 aa, Artificial Sequence
  Synthetic polypeptide
LKWMKETKF

SEQ ID NO: 19361 - protein, 2 aa, Artificial Sequence
  Synthetic polypeptide
NG

SEQ ID NO: 19362 - protein, 431 aa, Artificial Sequence; identical to SEQ ID NO: 2170
  Synthetic polypeptide

SEQ ID NO: 19363 - protein, 15 aa, Artificial Sequence
  Synthetic polypeptide
NVIHWESSATWSNSH

SEQ ID NO: 19364 - protein, 27 aa, Artificial Sequence
  Synthetic polypeptide
QRDPLGIFSYLEQQPLRINYKIKCLKP

SEQ ID NO: 19365 - protein, 78 aa, Artificial Sequence
  Synthetic polypeptide
SIGNLQLLGATAIEDKLQDQVPETIETLMKADIKIWILTGDKQETAINIGHSCKLLKKNMGMIVINEGSLDGFSSSKI

SEQ ID NO: 19366 - protein, 518 aa, Artificial Sequence
  Synthetic polypeptide
SIGNLQLLGATAIEDKLQDQVPETIETLMKADIKIWILTGDKQETAINIGHSCKLLKKNMGMIVINEGSLDGTRETLSRHCTTLGDALRKENDFALIIDGKTLKYALTFGVRQYFLDLALSCKAVICCRVSPLQKSEVVEMVKKQVKVVTLAIGDGANDVSMIQTAHVGVGISGNEGLQAANSSDYSIAQFKYLKNLLMIHGAWNYNRVSKCILYCFYKNIVLYIIEIWFAFVNGFSGQILFERWCIGLYNVMFTAMPPLTLGIFERSCRKENMLKYPELYKTSQNALDFNTKVFWVHCLNGLFHSVILFWFPLKALQYGTAFGNGKTSDYLLLGNFVYTFVVITVCLKAGLETSYWTWFSHIAIWGSIALWVVFFGIYSSLWPAIPMAPDMSGEAAMLFSSGVFWMGLLFIPVASLLLDVVYKVIKRTAFKTLVDEVQELEAKSQDPGAVVLGKSLTERAQLLKNVFKKNHVNLYRSESLQQNLLHGYAFSQDENGIVSQSEVIRAYDTTKQRPDEW

SEQ ID NO: 19367 - protein, 46 aa, Artificial Sequence
  Synthetic polypeptide
HGETPSLLKIQKISQAWWRVPVVPAPPEAEAGEWREPGRRSLRNIQ

SEQ ID NO: 19368 - protein, 47 aa, Artificial Sequence
  Synthetic polypeptide
KYKKLARRGGGCLLSQLLRRLRQENGVNPGGGACGIYNRYNFCPNLV

SEQ ID NO: 19369 - protein, 365 aa, Artificial Sequence
  Synthetic polypeptide
TREAELAEYTIDIIFAQTWFDSRLKFNSTMKVLMLNSNMVGKIWIPDTFFRNSRKSDAHWITTPNRLLRIWNDGRVLYTLRLTINAECYLQLHNFPMDEHSCPLEFSSYGYPKNEIEYKWKKPSVEVADPKYWRLYQFAFVGLRNSTEITHTISGDYVIMTIFFDLSRRMGYFTIQTYIPCILTVVLSWVSFWINKDAVPARTSLGITTVLTMTTLSTIARKSLPKVSYVTAMDLFVSVCFIFVFAALMEYGTLHYFTSNQKGKTATKDRKLKNKASMTPGLHPGSTLIPMNNISVPQEDDYGYQCLEGKDCASFFCCFEDCRTGSWREGRIHIRIAKIDSYSRIFFPTAFALFNLVYWVGYLYL

SEQ ID NO: 19370 - protein, 328 aa, Artificial Sequence
  Synthetic polypeptide
GLLHHMEIITTTAACMMDLRRYPLDEQNCTLEIESYGYTTDDIEFYWNGGEGAVTGVNKIELPQFSIVDYKMVSKKVEFTTGAYPRLSLSFRLKRNIGYFILQTYMPSTLITILSWVSFWINYDASAARVALGITTVLTMTTISTHLRETLPKIPYVKAIDIYLMGCFVFVFLALLEYAFVNYIFFGKGPQKKGASKQDQSANEKNKLEMNKVQVDAHGNILLSTLEIRNETSGSEVLTSVSDPKATMYSYDSASIQYRKPLSSREAYGRALDRHGVPSKGRIRRRASQLKVKIPDLTDVNSIDKWSRMFFPITFSLFNVVYWLYYVH

SEQ ID NO: 19371 - protein, 33 aa, Artificial Sequence
  Synthetic polypeptide
LSLSTMIVRPPPPHGNNHNHSCMYDGSSKISIG

SEQ ID NO: 19372 - protein, 15 aa, Artificial Sequence
  Synthetic polypeptide
EFKTSLGNIFLEPCV

SEQ ID NO: 19373 - protein, 181 aa, Artificial Sequence
  Synthetic polypeptide
LTPAIPELWEAVDHMKLRVQDQPGQHIFGAMCVTCNPPSNPYWIMQEHMLDPVFYLVCILTTSIALLPRFVYRVLQGSLFPSPILRAKHFDRLTPEERTKALKKWRGAGKMNQVTSKYANQSAGKSGRRPMPGPSAVFAMKSASSCAIEQGNLSLCETALDQGYSETKAFEMAGPSKGKES

SEQ ID NO: 19374 - protein, 91 aa, Artificial Sequence
  Synthetic polypeptide
PGAVTHTCNSRALGGCGSHEAKSSRPAWATYFWSHVCNLQPTIQPLLDYAGAHAGSSILLSLYPHDVHCSSAQVCIQSSSGIPVSISNSES

SEQ ID NO: 19375 - protein, 6 aa, Artificial Sequence
  Synthetic polypeptide
ITQSQI

SEQ ID NO: 19376 - protein, 38 aa, Artificial Sequence
  Synthetic polypeptide
TSFLYKLPSLRYETIHEEQYYQYTAVFCNHAQCDCTRY

SEQ ID NO: 19377 - protein, 746 aa, Artificial Sequence
  Synthetic polypeptide
WFYKGEFCCTSSLACCHVRCVFASPLLSAMIVRLPLAMWSYKSIKPLSFINYPVSDMKLSMKNNIINTQQSFVTMPNVIVPDIEKEIRRMENGACSSFSEDDDSASTSEESENENPHARGSFSYKSLRKGGPSQREQYLPGAIALFNVNNSSNKDQEPEEKKKKKKEKKSKSDDKNENKNDPEKKKKKKDKEKKKKEEKSKDKKEEEKKEVVVIDPSGNTYYNWLFCITLPVMYNWTMVIARACFDELQSDYLEYWLILDYVSDIVYLIDMFVRTRTGYLEQGLLVKEELKLINKYKSNLQFKLDVLSLIPTDLLYFKLGWNYPEIRLNRLLRFSRMFEFFQRTETRTNYPNIFRISNLVMYIVIIIHWNACVFYSISKAIGFGNDTWVYPDINDPEFGRLARKYVYSLYWSTLTLTTIGETPPPVRDSEYVFVVVDFLIGVLIFATIVGNIGSMISNMNAARAEFQARIDAIKQYMHFRNVSKDMEKRVIKWFDYLWTNKKTVDEKEVLKYLPDKLRAEIAINVHLDTLKKVRIFADCEAGLLVELVLKLQPQVYSPGDYICKKGDIGREMYIIKEGKLAVVADDGVTQFVVLSDGSYFGEISILNIKGSKAGNRRTANIKSIGYSDLFCLSKDDLMEALTEYPDAKTMLEEKGKQILMKDGLLDLNIANAGSDPKDLEEKVTRMEGSVDLLQTRFARILAEYESMQQKLKQRLTKVEKFLKPLIDTEFSSIEGPGAESGPIDST

SEQ ID NO: 19378 - protein, 21 aa, Artificial Sequence
  Synthetic polypeptide
GWVRWLTAVILALWEAKKSGR

SEQ ID NO: 19379 - protein, 13 aa, Artificial Sequence
  Synthetic polypeptide
HFGRQRKVGDRSI

SEQ ID NO: 19380 - protein, 282 aa, Artificial Sequence
  Synthetic polypeptide
MGAVAHSCNPSTLGGKEKWEIDPSELAFIKEIGSGQFGVVHLGEWRSHIQVAIKAINEGSMSEEDFIEEAKVMMKLSHSKLVQLYGVCIQRKPLYIVTEFMENGCLLNYLRENKGKLRKEMLLSVCQDICEGMEYLERNGYIHRDLAARNCLVSSTCIVKISDFGMTRYVLDDEYVSSFGAKFPIKWSPPEVFLFNKYSSKSDVWSFGVLMWEVFTEGKMPFENKSNLQVVEAISEGFRLYRPHLAPMSIYEVMYSCWHEKPEGRPTFAELLRAVTEIAETW

SEQ ID NO: 19381 - protein, 8 aa, Artificial Sequence
  Synthetic polypeptide
FLGCQKLS

SEQ ID NO: 19382 - protein, 10 aa, Artificial Sequence
  Synthetic polypeptide
FLGCQKLSSK

SEQ ID NO: 19383 - protein, 8 aa, Artificial Sequence
  Synthetic polypeptide
FPRLPEIV

SEQ ID NO: 19384 - protein, 48 aa, Artificial Sequence
  Synthetic polypeptide
KPLEDVLYQKKDEDTGNWVSIRRERQKEVQHEHNTCYLGRDSHWTKWL

SEQ ID NO: 19385 - protein, 292 aa, Artificial Sequence
  Synthetic polypeptide
SIIKTYFCHAHFPKNFTSHTLLRSHWRMCSTKRKMRIQETGCLSEEKDKRKFSMNITLVIWAVIRIGPNGCDSMEFHESGLLRFKQVSDMGVIHPLYKSTVGGRRNENLVITGNNQPIVFQQGTTKLSVENNKTSITSDIGMQFFDPRTQNILFSTDYETHEFHLPSGVKSLNVQKASTERITSNATSDLNIKVDGRAIVRGNEGVFIMGKTIEFHMGGNMELKAENSIILNGSVMVSTTRLPSSSSGDQLGSGDWVRYKLCMCADGTLFKVQVTSQNMGCQISDNPCGNTH

SEQ ID NO: 19386 - protein, 1 aa, Artificial Sequence
  Synthetic polypeptide
T

SEQ ID NO: 19387 - protein, 67 aa, Artificial Sequence
  Synthetic polypeptide
DSLSHALFSSFSTSSSLAARQETEEPSLGFLMHIEKRSEDTVIWQVPVKKPYNTCYLGRDSHWTKWL

SEQ ID NO: 19388 - protein, 240 aa, Artificial Sequence
  Synthetic polypeptide
KSHITLVIWAVIRIGPNGCDSMEFHESGLLRFKQVSDMGVIHPLYKSTVGGRRNENLVITGNNQPIVFQQGTTKLSVENNKTSITSDIGMQFFDPRTQNILFSTDYETHEFHLPSGVKSLNVQKASTERITSNATSDLNIKVDGRAIVRGNEGVFIMGKTIEFHMGGNMELKAENSIILNGSVMVSTTRLPSSSSGDQLGSGDWVRYKLCMCADGTLFKVQVTSQNMGCQISDNPCGNTH

SEQ ID NO: 19389 - protein, 13 aa, Artificial Sequence
  Synthetic polypeptide
RYCHLASPGEKAI

SEQ ID NO: 19390 - protein, 284 aa, Artificial Sequence; identical to SEQ ID NO: 2557
  Synthetic polypeptide

SEQ ID NO: 19391 - protein, 13 aa, Artificial Sequence
  Synthetic polypeptide
KKDLKILSFGKSR

SEQ ID NO: 19392 - protein, 24 aa, Artificial Sequence
  Synthetic polypeptide
RYCHLASPDNTCYLGRDSHWTKWL

SEQ ID NO: 19393 - protein, 73 aa, Artificial Sequence
  Synthetic polypeptide
AEGDGWDPDAWSCLLPDQTRRSIEKLLEWENNRLYHKLCLHWRLSKRKCETNNMMEYVILIEFLPKTPIFRPD

SEQ ID NO: 19394 - protein, 21 aa, Artificial Sequence
  Synthetic polypeptide
GRWVGSRCLELSTSRPDTKID

SEQ ID NO: 19395 - protein, 26 aa, Artificial Sequence
  Synthetic polypeptide
MREMGGIQMLGAVYFQTRHEDRLRSY

SEQ ID NO: 19396 - protein, 10 aa, Artificial Sequence
  Synthetic polypeptide
KIKDSLISSP

SEQ ID NO: 19397 - protein, 4 aa, Artificial Sequence
  Synthetic polypeptide
LSKR

SEQ ID NO: 19398 - protein, 666 aa, Artificial Sequence
  Synthetic polypeptide
VKDKGFINIFPMINTTVFVNDGENVDLIVEYEAFPKPEHQQWIYMNRTFTDKWEDYPKSENESNIRYVSELHLTRLKGTEGGTYTFLVSNSDVNAAIAFNVYVNTKPEILTYDRLVNGMLQCVAAGFPEPTIDWYFCPGTEQRCSASVLPVDVQTLNSSGPPFGKLVVQSSIDSSAFKHNGTVECKAYNDVGKTSAYFNFAFKEQIHPHTLFTPLLIGFVIVAGMMCIIVMILTYKYLQKPMYEVQWKVVEEINGNNYVYIDPTQLPYDHKWEFPRNRLSFGKTLGAGAFGKVVEATAYGLIKSDAAMTVAVKMLKPSAHLTEREALMSELKVLSYLGNHMNIVNLLGACTIGGPTLVITEYCCYGDLLNFLRRKRDSFICSKQEDHAEAALYKNLLHSKESSCSDSTNEYMDMKPGVSYVVPTKADKRRSVRIGSYIERDVTPAIMEDDELALDLEDLLSFSYQVAKGMAFLASKNCIHRDLAARNILLTHGRITKICDFGLARDIKNDSNYVVKGNARLPVKWMAPESIFNCVYTFESDVWSYGIFLWELFSLGSSPYPGMPVDSKFYKMIKEGFRMLSPEHAPAEMYDIMKTCWDADPLKRPTFKQIVQLIEKQISESTNHIYSNLANCSPNRQKPVVDHSVRINSVGSTASSSQPLLVHDDV

SEQ ID NO: 19399 - protein, 670 aa, Artificial Sequence
  Synthetic polypeptide
VKDKGFINIFPMINTTVFVNDGENVDLIVEYEAFPKPEHQQWIYMNRTFTDKWEDYPKSENESNIRYVSELHLTRLKGTEGGTYTFLVSNSDVNAAIAFNVYVNTKPEILTYDRLVNGMLQCVAAGFPEPTIDWYFCPGTEQRCSASVLPVDVQTLNSSGPPFGKLVVQSSIDSSAFKHNGTVECKAYNDVGKTSAYFNFAFKGNNKEQIHPHTLFTPLLIGFVIVAGMMCIIVMILTYKYLQKPMYEVQWKVVEEINGNNYVYIDPTQLPYDHKWEFPRNRLSFGKTLGAGAFGKVVEATAYGLIKSDAAMTVAVKMLKPSAHLTEREALMSELKVLSYLGNHMNIVNLLGACTIGGPTLVITEYCCYGDLLNFLRRKRDSFICSKQEDHAEAALYKNLLHSKESSCSDSTNEYMDMKPGVSYVVPTKADKRRSVRIGSYIERDVTPAIMEDDELALDLEDLLSFSYQVAKGMAFLASKNCIHRDLAARNILLTHGRITKICDFGLARDIKNDSNYVVKGNARLPVKWMAPESIFNCVYTFESDVWSYGIFLWELFSLGSSPYPGMPVDSKFYKMIKEGFRMLSPEHAPAEMYDIMKTCWDADPLKRPTFKQIVQLIEKQISESTNHIYSNLANCSPNRQKPVVDHSVRINSVGSTASSSQPLLVHDDV

SEQ ID NO: 19400 - protein, 17 aa, Artificial Sequence
  Synthetic polypeptide
DPGLALYDLAQSGMLSL

SEQ ID NO: 19401 - protein, 6 aa, Artificial Sequence
  Synthetic polypeptide
PWTCPV

SEQ ID NO: 19402 - protein, 1172 aa, Artificial Sequence
  Synthetic polypeptide
TLDLPCMIWPKVECCHFKTAVEAPLGMKLDKKMEVFIPLSTSAASSGPWAHSLFAFIPSWPKKNLFKRESPITHRLYGDISREVQGTSENGVIFQKCALVSGSSEAQTARIWLLVNNTKTTSSANLSELLLLDSIAGLTIWDSVGNRTSEGFQAFSKKFLQVGDAFAVSYAATLQAGDLGNGESLKLPAQLTFQSSSRNRTQLKVLFSITAEENVTVLPHHGLHAAGFFIAFLLSLVLTWAALFLMVRYQCLKGNMLTRHRVWQYESKLEPLPFTSADGVNEDLSLNDQMIDILSSEDPGSMLQALEELEIATLNRADADLEACRTQISKDIIALLLKNLTSSGHLSPQVERKMSAVFKKQFLLLENEIQEEYDRKMVALTAECDLETRKKMENQYQREMMAMEEAEELLKRAGERSAVECSNLLRTLHGLEQEHLRKSLALQQEEDFAKAHRQLAVFQRNELHSIFFTQIKSAIFKGELKPEAAKMLLQNYSKIQENVEELMDFFQASKRYHLSKRFGHREYLVQNLQSSETRVQGLLSTAAAQLTHLIQKHERAGYLDEDQMEMLLERAQTEVFSIKQKLDNDLKQEKKKLHQKLITKRRRELLQKHREQRREQASVGEAFRTVEDAGQYLHQKRSLMEEHGATLEELQERLDQAALDDLRTLTLSLFEKATDELRRLQNSAMTQELLKRGVPWLFLQQILEEHGKEMAARAEQLEGEERDRDQEGVQSVRQRLKDDAPEAVTEEQAELRRWEHLIFMKLCSSVFSLSEEELLRMRQEVHGCFAQMDRSLALPKIRARVLLQQFQTAWREAEFVKLDQAVAAPELQQQSKVRKSRSKSKSKGELLKKCIEDKIHLCEEQASEDLVEKVRGELLRERVQRMEAQEGGFAQSLVALQFQKASRVTETLSAYTALLSIQDLLLEELSASEMLTKSACTQILESHSRELQELERKLEDQLVQQEAAQQQQALASWQQWVADGPGILNEPGEVDSERQVSTVLHQALSKSQTLLEQHQQCLREEQQNSVVLEDLLENMEADTFATLCSQELRLASYLARMAMVPGATLRRLLSVVLPTASQPQLLALLDSATERHVDHAAESDGGAEQADVGRRRKHQSWWQALDGKLRGDLISRGLEKMLWARKRKQRSGNQESFWQYLVGTPEIGLIEWMSEK

SEQ ID NO: 19403 - protein, 1234 aa, Artificial Sequence
  Synthetic polypeptide
TLDLPCMIWPKVECCHFKTAVEAPLGMKLDKKMEVFIPLSTSAASSGPWAHSLFAFIPSWPKKNLFKRESPITHRLYGDISREVQGTSENGVIFQKCALVSGSSEAQTARIWLLVNNTKTTSSANLSELLLLDSIAGLTIWDSVGNRTSEGFQAFSKKFLQVGDAFAVSYAATLQAGDLGNGESLKLPAQLTFQSSSRNRTQLKVLFSITAEENVTVLPHHGLHAAGFFIAFLLSLVLTWAALFLMVRYQCLKGNMLTRHRVWQYESKLEPLPFTSADGVNEDLSLNDQMIDILSSEDPGSMLQALEELEIATLNRADADLEACRTQISKDIIALLLKNLTSSGHLSPQVERKMSAVFKKQFLLLENEIQEEYDRKMVALTAECDLETRKKMENQYQREMMAMEEAEELLKRAGERSAVECSNLLRTLHGLEQEHLRKSLALQQEEDFAKAHRQLAVFQRNELHSIFFTQIKSAIFKGELKPEAAKMLLQNYSKIQENVEELMDFFQASKRYHLSKRFGHREYLVQNLQSSETRVQGLLSTAAAQLTHLIQKHERAGYLDEDQMEMLLERAQTEVFSIKQKLDNDLKQEKKKLHQKLITKRRRELLQKHREQRREQASVGEAFRTVEDAGQYLHQKRSLMEEHGATLEELQERLDQAALDDLRTLTLSLFEKATDELRRLQNSAMTQELLKRGVPWLFLQQILEEHGKEMAARAEQLEGEERDRDQEGVQSVRQRLKDDAPEAVTEEQAELRRWEHLIFMKLCSSVFSLSEEELLRMRQEVHGCFAQMDRSLALPKIRARVLLQQFQTAWREAEFVKLDQAVAAPELQQQSKVRKSRSKSKSKGELLKKCIEDKIHLCEEQASEDLVEKVRGELLRERVQRMEAQEGGFAQSLVALQFQKASRVTETLSAYTALLSIQDLLLEELSASEMLTKSACTQILESHSRELQELERKLEDQLVQQEAAQQQQALASWQQWVADGPGILNEPGEVDSERQVSTVLHQALSKSQTLLEQHQQCLREEQQNSVVLEDLLENMEADTFATLCSQELRLASYLARMAMVPGATLRRLLSVVLPTASQPQLLALLDSATERHVDHAAESDGGAEQADVGRRRKHQSWWQALDGKLRGDLISRGLEKMLWARKRKQSILKKTCLPLRERMIFSGKGSWPHLSLEPIGELAPVPIVGAETIDLLNTGEKLFIFRNPKEPEISLHVPPRKKKNFLNAKKAMRALGMD

SEQ ID NO: 19404 - protein, 918 aa, Artificial Sequence
  Synthetic polypeptide
LHLSVTHFLCLEVETVTSVAGSLEAWGGSPPSNSNITAFALKAKVIYPINQKFRPLADGSSNPSLHENLKQAVLPHQPVEASPSSSLGSLSQGEKDDCSSSSSVHSATSDDRFLSRTFLRVNAFPEVLACESVDVDLCIYSLHLKDLLHLDTALRQEKHMMFIQIFKMCLLDLLPKKKSDDELYQKILSKQEKDLEELEKGLQVKLSNTEMSGAGDSEYITLADVEKKEREYSEQLIDNMEAFWKQMANIQHFLVDQFKCSSSKARQLMMTLTERMIAAEGLLCDSQELQALDALERTMGRAHMAKVIEFLKLQVQEETRCRLAAISHGLELLAGEGKLSGRQKEELLTQQHKAFWQEAERFSREFVQRGKDLVTASLAHQVEGTAKLTLAQEEEQRSFLAEAQPTADPEKFLEAFHEVLERQRLMQCDLEEEENVRATEAVVALCQELYFSTVDTFQKFVDALFLQTLPGMTGLPPEECDYLRQEVQENAAWQLGKSNRFRRQQWKLFQELLEQDQQVWMEECALSSVLQTHLREDHEGTIRGVLGRLGGLTEESTRCVLQGHDLLLRSALRRLALRGNALATLTQMRLSGKKHLLQELREQRALEQGSSQCLDEHQWQLLRALEARVLEEASRLEEEAQQTRLQLQQRLLAEAQEVGQLLQQHMECAIGQALLVHARNAATKSRAKDRDDFKRTLMEAAVESVYVTSAGVSRLVQAYYQQIGRIMEDHEERKLQHLKTLQGERMENYKLRKKQELSNPSSGSRTAGGAHETSQAVHQRMLSQQKRFLAQFPVHQQMRLHAQQQQAGVMDLLEAQLETQLQEAEQNFISELAALARVPLAESKLLPAKRGLLEKPLRTKRKKPLPQERGDLGVPNNEDLASGDQTSGSLSSKRLSQQESEAGDSGNSKKMLKRRSNL

SEQ ID NO: 19405 - protein, 461 aa, Artificial Sequence
  Synthetic polypeptide
LHLSVTHFLCLEVETVTSVAGSLEAWGGSPPSNSNITAFALKAKVIYPINQKFRPLADGSSNPSLHENLKQAVLPHQPVEASPSSSLGSLSQGEKDDCSSSSSVHSATSDDRFLSRTFLRVNAFPEVLACESVDVDLCIYSLHLKDLLHLDTALRQEKHMMFIQIFKMCLLDLLPKKKSDDELYQKILSKQEKDLEELEKGLQVKLSNTEMSGAGDSEYITLADVEKKEREYSEQLIDNMEAFWKQMANIQHFLVDQFKCSSSKARQLMMTLTERMIAAEGLLCDSQELQALDALERTMGRAHMAKVIEFLKLQVQEETRCRLAAISHGLELLAGEGKLSGRQKEELLTQQHKAFWQEAERFSREFVQRGKDLVTASLAHQVEGTAKLTLAQEEEQRSFLAEAQPTADPEKFLEAFHEVLERQRLMQCDLEEEENVRATEAVVALCQKAMRRHRDTGKEAV

SEQ ID NO: 19406 - protein, 37 aa, Artificial Sequence
  Synthetic polypeptide
PAFQQQYHSIRPEGQSHLPHQSEVPASGRWLLQPVSA

SEQ ID NO: 19407 - protein, 24 aa, Artificial Sequence
  Synthetic polypeptide
PLWQGPWKLGEVARLPTAISQHSP

SEQ ID NO: 19408 - protein, 803 aa, Artificial Sequence
  Synthetic polypeptide
GWAPWLMPVIPTFGRPSVDVDLCIYSLHLKDLLHLDTALRQEKHMMFIQIFKMCLLDLLPKKKSDDELYQKILSKQEKDLEELEKGLQVKLSNTEMSGAGDSEYITLADVEKKEREYSEQLIDNMEAFWKQMANIQHFLVDQFKCSSSKARQLMMTLTERMIAAEGLLCDSQELQALDALERTMGRAHMAKVIEFLKLQVQEETRCRLAAISHGLELLAGEGKLSGRQKEELLTQQHKAFWQEAERFSREFVQRGKDLVTASLAHQVEGTAKLTLAQEEEQRSFLAEAQPTADPEKFLEAFHEVLERQRLMQCDLEEEENVRATEAVVALCQELYFSTVDTFQKFVDALFLQTLPGMTGLPPEECDYLRQEVQENAAWQLGKSNRFRRQQWKLFQELLEQDQQVWMEECALSSVLQTHLREDHEGTIRGVLGRLGGLTEESTRCVLQGHDLLLRSALRRLALRGNALATLTQMRLSGKKHLLQELREQRALEQGSSQCLDEHQWQLLRALEARVLEEASRLEEEAQQTRLQLQQRLLAEAQEVGQLLQQHMECAIGQALLVHARNAATKSRAKDRDDFKRTLMEAAVESVYVTSAGVSRLVQAYYQQIGRIMEDHEERKLQHLKTLQGERMENYKLRKKQELSNPSSGSRTAGGAHETSQAVHQRMLSQQKRFLAQFPVHQQMRLHAQQQQAGVMDLLEAQLETQLQEAEQNFISELAALARVPLAESKLLPAKRGLLEKPLRTKRKKPLPQERGDLGVPNNEDLASGDQTSGSLSSKRLSQQESEAGDSGNSKKMLKRRSNL

SEQ ID NO: 19409 - protein, 346 aa, Artificial Sequence
  Synthetic polypeptide
GWAPWLMPVIPTFGRPSVDVDLCIYSLHLKDLLHLDTALRQEKHMMFIQIFKMCLLDLLPKKKSDDELYQKILSKQEKDLEELEKGLQVKLSNTEMSGAGDSEYITLADVEKKEREYSEQLIDNMEAFWKQMANIQHFLVDQFKCSSSKARQLMMTLTERMIAAEGLLCDSQELQALDALERTMGRAHMAKVIEFLKLQVQEETRCRLAAISHGLELLAGEGKLSGRQKEELLTQQHKAFWQEAERFSREFVQRGKDLVTASLAHQVEGTAKLTLAQEEEQRSFLAEAQPTADPEKFLEAFHEVLERQRLMQCDLEEEENVRATEAVVALCQKAMRRHRDTGKEAV

SEQ ID NO: 19410 - protein, 19 aa, Artificial Sequence
  Synthetic polypeptide
MGTMAHACNPNIWEAKCRR

SEQ ID NO: 19411 - protein, 8 aa, Artificial Sequence
  Synthetic polypeptide
SQHLGGQV

SEQ ID NO: 19412 - protein, 18 aa, Artificial Sequence
  Synthetic polypeptide
GAAKSQGLESDWLRIWRN

SEQ ID NO: 19413 - protein, 22 aa, Artificial Sequence
  Synthetic polypeptide
GFGGTRKGTSGQTVKHRNVGGW

SEQ ID NO: 19414 - protein, 738 aa, Artificial Sequence; identical to SEQ ID NO: 1696
  Synthetic polypeptide

SEQ ID NO: 19415 - protein, 281 aa, Artificial Sequence; identical to SEQ ID NO: 2566
  Synthetic polypeptide

SEQ ID NO: 19416 - protein, 29 aa, Artificial Sequence
  Synthetic polypeptide
CPPERSCTSAPWTLSRSSWMPCSFRRSLA

SEQ ID NO: 19417 - protein, 96 aa, Artificial Sequence
  Synthetic polypeptide
EDIETQGRRLFEDRRRDWSDAATSRGTPAATKSQKSPGRAPPRAFGGGEALPTPWFHTNALRNGAVLQHRGHFPEVRGCPVPSDAPWHDWPPPGRV

SEQ ID NO: 19418 - protein, 531 aa, Artificial Sequence
  Synthetic polypeptide
RHREGGCLKTEGGTGVMQPQAEEHLQPPKARRAQEGPLPEPLEGARLCQHLGFILMPSGTELYFSTVDTFQKFVDALFLQTLPGMTGLPPEECDYLRQEVQENAAWQLGKSNRFRRQQWKLFQELLEQDQQVWMEECALSSVLQTHLREDHEGTIRGVLGRLGGLTEESTRCVLQGHDLLLRSALRRLALRGNALATLTQMRLSGKKHLLQELREQRALEQGSSQCLDEHQWQLLRALEARVLEEASRLEEEAQQTRLQLQQRLLAEAQEVGQLLQQHMECAIGQALLVHARNAATKSRAKDRDDFKRTLMEAAVESVYVTSAGVSRLVQAYYQQIGRIMEDHEERKLQHLKTLQGERMENYKLRKKQELSNPSSGSRTAGGAHETSQAVHQRMLSQQKRFLAQFPVHQQMRLHAQQQQAGVMDLLEAQLETQLQEAEQNFISELAALARVPLAESKLLPAKRGLLEKPLRTKRKKPLPQERGDLGVPNNEDLASGDQTSGSLSSKRLSQQESEAGDSGNSKKMLKRRSNL

SEQ ID NO: 19419 - protein, 51 aa, Artificial Sequence
  Synthetic polypeptide
ARECKCPLGTGKGKKMDSAPDPRGGVQTCQPSFQASDLQKRKVHAVCPAGA

SEQ ID NO: 19420 - protein, 397 aa, Artificial Sequence
  Synthetic polypeptide
ELERARKWILPQTLGEECRPANPHFRLPISRSVRSTRCVLQGHDLLLRSALRRLALRGNALATLTQMRLSGKKHLLQELREQRALEQGSSQCLDEHQWQLLRALEARVLEEASRLEEEAQQTRLQLQQRLLAEAQEVGQLLQQHMECAIGQALLVHARNAATKSRAKDRDDFKRTLMEAAVESVYVTSAGVSRLVQAYYQQIGRIMEDHEERKLQHLKTLQGERMENYKLRKKQELSNPSSGSRTAGGAHETSQAVHQRMLSQQKRFLAQFPVHQQMRLHAQQQQAGVMDLLEAQLETQLQEAEQNFISELAALARVPLAESKLLPAKRGLLEKPLRTKRKKPLPQERGDLGVPNNEDLASGDQTSGSLSSKRLSQQESEAGDSGNSKKMLKRRSNL

SEQ ID NO: 19421 - protein, 30 aa, Artificial Sequence
  Synthetic polypeptide
GPRGVSCRGMTCCCAQPSGGWHSAATPWPP

SEQ ID NO: 19422 - protein, 460 aa, Artificial Sequence
  Synthetic polypeptide
FMDNMNVSIEKPKGSTNCHNYEDCSEMSPYTKSVSQTSRFPPYQQHPVTKKDHLQNKSHKVWMEECALSSVLQTHLREDHEGTIRGVLGRLGGLTEESTRCVLQGHDLLLRSALRRLALRGNALATLTQMRLSGKKHLLQELREQRALEQGSSQCLDEHQWQLLRALEARVLEEASRLEEEAQQTRLQLQQRLLAEAQEVGQLLQQHMECAIGQALLVHARNAATKSRAKDRDDFKRTLMEAAVESVYVTSAGVSRLVQAYYQQIGRIMEDHEERKLQHLKTLQGERMENYKLRKKQELSNPSSGSRTAGGAHETSQAVHQRMLSQQKRFLAQFPVHQQMRLHAQQQQAGVMDLLEAQLETQLQEAEQNFISELAALARVPLAESKLLPAKRGLLEKPLRTKRKKPLPQERGDLGVPNNEDLASGDQTSGSLSSKRLSQQESEAGDSGNSKKMLKRRSNL

SEQ ID NO: 19423 - protein, 38 aa, Artificial Sequence
  Synthetic polypeptide
KPQGVDGGVCAVQRAADTPAGGPRGHHPRRLGPTGRPH

SEQ ID NO: 19424 - protein, 78 aa, Artificial Sequence
  Synthetic polypeptide
QRKIIFRIKATRCGWRSVRCPACCRHTCGRTTRAPSAASWADWAASLKSPRGVSCRGMTCCCAQPSGGWHSAATPWPP

SEQ ID NO: 19425 - protein, 30 aa, Artificial Sequence; identical to SEQ ID NO: 19421
  Synthetic polypeptide

SEQ ID NO: 19426 - protein, 26 aa, Artificial Sequence
  Synthetic polypeptide
GWVWWLTSVIPALWEAEVHAVCPAGA

SEQ ID NO: 19427 - protein, 371 aa, Artificial Sequence
  Synthetic polypeptide
SQHFGRLRSTRCVLQGHDLLLRSALRRLALRGNALATLTQMRLSGKKHLLQELREQRALEQGSSQCLDEHQWQLLRALEARVLEEASRLEEEAQQTRLQLQQRLLAEAQEVGQLLQQHMECAIGQALLVHARNAATKSRAKDRDDFKRTLMEAAVESVYVTSAGVSRLVQAYYQQIGRIMEDHEERKLQHLKTLQGERMENYKLRKKQELSNPSSGSRTAGGAHETSQAVHQRMLSQQKRFLAQFPVHQQMRLHAQQQQAGVMDLLEAQLETQLQEAEQNFISELAALARVPLAESKLLPAKRGLLEKPLRTKRKKPLPQERGDLGVPNNEDLASGDQTSGSLSSKRLSQQESEAGDSGNSKKMLKRRSNL

SEQ ID NO: 19428 - protein, 34 aa, Artificial Sequence
  Synthetic polypeptide
GRTRWLMPVIPALWEAEAGGSRGQEIKTILANTV

SEQ ID NO: 19429 - protein, 47 aa, Artificial Sequence
  Synthetic polypeptide
PDALAHACNPSTLGGRGGRITGSGDQDHPGEHGVKWVILVSDVNTSF

SEQ ID NO: 19430 - protein, 100 aa, Artificial Sequence
  Synthetic polypeptide
SQHFGRPRRADHGVRRSRPSWRTRCEVGYTGVRCEHFFLTVHQPLSKEYVALTVILIILFLITVVGSTYYFCRWYRNRKSKEPKKEYERVTSGDPELPQV

SEQ ID NO: 19431 - protein, 15 aa, Artificial Sequence
  Synthetic polypeptide
CWHPPRGHPCQLLTQ

SEQ ID NO: 19432 - protein, 104 aa, Artificial Sequence; identical to SEQ ID NO: 3561
  Synthetic polypeptide

SEQ ID NO: 19433 - protein, 952 aa, Artificial Sequence; identical to SEQ ID NO: 1565
  Synthetic polypeptide

SEQ ID NO: 19434 - protein, 967 aa, Artificial Sequence; identical to SEQ ID NO: 1559
  Synthetic polypeptide

SEQ ID NO: 19435 - protein, 1957 aa, Artificial Sequence
  Synthetic polypeptide
GLCRSKSCYASCTACRTVEEGGKADTLSSKLQAGDEVVHINEVTLSSSRKEAVSLVKGSYKTLRLVVRRDVCTDPGHADTGASNFVSPEHLTSGPQHRKAAWSGGVKLRLKHRRSEPAGRPHSWHTTKSGEKQPDASMMQISQGMIGPPWHQSYHSSSSTSDLSNYDHAYLRRSPDQCSSQGSMESLEPSGAYPPCHLSPAKSTGSIDQLSHFHNKRDSAYSSFSTSSSILEYPHPGISGRERSGSMDNTSARGGLLEGMRQADIRYVKTVYDTRRGVSAEYEVNSSALLLQGREARASANGQGYDKWSNIPRGKGVPPPSWSQQCPSSLETATDNLPPKVGAPLPPARSDSYAAFRHRERPSSWSSLDQKRLCRPQANSLGSLKSPFIEEQLHTVLEKSPENSPPVKPKHNYTQKAQPGQPLLPTSIYPVPSLEPHFAQVPQPSVSSNGMLYPALAKESGYIAPQGACNKMATIDENGNQNGSGRPGFAFCQPLEHDLLSPVEKKPEATAKYVPSKVHFCSVPENEEDASLKRHLTPPQGNSPHSNERKSTHSNKPSSHPHSLKCPQAQAWQAGEDKRSSRLSEPWEGDFQEDHNANLWRRLEREGLGQSLSGNFGKTKSAFSSLQNIPESLRRHSSLELGRGTQEGYPGGRPTCAVNTKAEDPGRKAAPDLGSHLDRQVSYPRPEGRTGASASFNSTDPSPEEPPAPSHPHTSSLGRRGPGPGSASALQGFQYGKPHCSVLEKVSKFEQREQGSQRPSVGGSGFGHNYRPHRTVSTSSTSGNDFEETKAHIRFSESAEPLGNGEQHFKNGELKLEEASRQPCGQQLSGGASDSGRGPQRPDARLLRSQSTFQLSSEPEREPEWRDRPGSPESPLLDAPFSRAYRNSIKDAQSRVLGATSFRRRDLELGAPVASRSWRPRPSSAHVGLRSPEASASASPHTPRERHSVTPAEGDLARPVPPAARRGARRRLTPEQKKRSYSEPEKMNEVGIVEEAEPAPLGPQRNGMRFPESSVADRRRLFERDGKACSTLSLSGPELKQFQQSALADYIQRKTGKRPTSAAGCSLQEPGPLRERAQSAYLQPGPAALEGSGLASASSLSSLREPSLQPRREATLLPATVAETQQAPRDRSSSFAGGRRLGERRRGDLLSGANGGTRGTQRGDETPREPSSWGARAGKSMSAEDLLERSDVLAGPVHVRSRSSPATADKRQDVLLGQDSGFGLVKDPCYLAGPGSRSLSCSERGQEEMLPLFHHLTPRWGGSGCKAIGDSSVPSECPGTLDHQRQASRTPCPRPPLAGTQGLVTDTRAAPLTPIGTPLPSAIPSGYCSQDGQTGRQPLPPYTPAMMHRSNGHTLTQPPGPRGCEGDGPEHGVEEGTRKRVSLPQWPPPSRAKWAHAAREDSLPEESSAPDFANLKHYQKQQSLPSLCSTSDPDTPLGAPSTPGRISLRISESVLRDSPPPHEDYEDEVFVRDPHPKATSSPTFEPLPPPPPPPPSQETPVYSMDDFPPPPPHTVCEAQLDSEDPEGPRPSFNKLSKVTIARERHMPGAAHVVGSQTLASRLQTSIKGSEAESTPPSFMSVHAQLAGSLGGQPAPIQTQSLSHDPVSGTQGLEKKVSPDPQKSSEDIRTEALAKEIVHQDKSLADILDPDSRLKTTMDLMEGLFPRDVNLLKENSVKRKAIQRTVSSSGCEGKRNEDKEAVSMLVNCPAYYSVSAPKAELLNKIKEMPAEVNEEEEQADVNEKKAELIGSLTHKLETLQEAKGSLLTDIKLNNALGEEVEALISELCKPNEFDKYRMFIGDLDKVVNLLLSLSGRLARVENVLSGLGEDASNEERSSLYEKRKILAGQHEDARELKENLDRRERVVLGILANYLSEEQLQDYQHFVKMKSTLLIEQRKLDDKIKLGQEQVKCLLESLPSDFIPKAGALALPPNLTSEPIPAGGCTFSGIFPTLTSPL

SEQ ID NO: 19436 - protein, 29 aa, Artificial Sequence
  Synthetic polypeptide
KLLCFLYSLQNRRRRGQSRHPELQTAGWG

SEQ ID NO: 19437 - protein, 30 aa, Artificial Sequence
  Synthetic polypeptide
KLPEASAEVKAAMLPVQPAEPSKKGAKQTP

SEQ ID NO: 19438 - protein, 166 aa, Artificial Sequence
  Synthetic polypeptide
LGYIKTAITCASTVQLISTTLGASASGARMPTTCCSGTTVFLTALQDTMQREELVKNATPPAEPARAEDLSPAPHVTPTSCCPTLAPAAPPASLGTILMTIMFASHATHTVEAVIHRPAVPPAEIQTRFCSLGNVNTRAAPHSTILTSPPTRAKSVIGAAVHAVGP

SEQ ID NO: 19439 - protein, 11 aa, Artificial Sequence
  Synthetic polypeptide
RLPSPVPALCS

SEQ ID NO: 19440 - protein, 3230 aa, Artificial Sequence
  Synthetic polypeptide
VLHATKTKTKKPPGQINLGLTRLHKDCHHLCQHCAADLHNTGSICLRCQNAHYLLLGDHCVPDCPSGYYAERGACKKCHSSCRTCQGRGPFSCSSCDTNLVLSHTGTCSTTCFPGHYLDDNHVCQPCNTHCGSCDSQASCTSCRDPNKVLLFGECQYESCAPQYYLDFSTNTCKECDWSCSACSGPLKTDCLQCMDGYVLQDGACVEQCLSSFYQDSGLCKNCDSYCLQCQGPHECTRCKGPFLLLEAQCVQECGKGYFADHAKHKCTACPQGCLQCSHRDRCHLCDHGFFLKSGLCVYNCVPGFSVHTSNETCSGKIHTPSLHVNGSLILPIGSIKPLDFSLLNVQDQEGRVEDLLFHVVSTPTNGQLVLSRNGKEVQLDKAGRFSWKDVNEKKVRFVHSKEKLRKGYLFLKISDQQFFSEPQLINIQAFSTQAPYVLRNEVLHISRGERATITTQMLDIRDDDNPQDVVIEIIDPPLHGQLLQTLQSPATPIYQFQLDELSRGLLHYAHDGSDSTSDVAVLQANDGHSFHNILFQVKTVPQNDRGLQLVANSMVWVPEGGMLQITNRILQAEAPGASAEEIIYKITQDYPQFGEVVLLVNMPADSPADEGQHLPDGRTATPTSTFTQQDINEGIVWYRHSGAPAQSDSFRFEVSSASNAQTRLESHMFNIAILPQTPEAPKVSLEASLHMTAREDGLTVIQPHSLSFINSEKPSGKIVYNITLPLHPNQGIIEHRDHPHSPIRYFTQEDINQGKVMYRPPPAAPHLQELMAFSFAGLPESVKFHFTVSDGEHTSPEMVLTIHLLPSDQQLPVFQVTAPRLAVSPGGSTSVGLQVVVRDAETAPKELFFELRRPPQHGVLLKHTAEFRRPMATGDTFTYEDVEKNALQYIHDGSSTREDSMEISVTDGLTVTMLEVRVEVSLSEDRGPRLAAGSSLSITVASKSTAIITRSHLAYVDDSSPDPEIWIQLNYLPSYGTLLRISGSEVEELSEVSNFTMEDINNKKIRYSAVFETDGHLVTDSFYFSVSDMDHNHLDNQIFTIMITPAENPPPVIAFADLITVDEGGRAPLSFHHFFATDDDDNLQRDAIIKLSALPKYGCIENTGTGDRFGPETASDLEASFPIQDVLENYIYYFQSVHESIEPTHDIFSFYVSDGTSRSEIHSINITIERKNDEPPRMTLQPLRVQLSSGVVISNSSLSLQDLDTPDNELIFVLTKKPDHGHVLWRQTASEPLENGRVLVQGSTFTYQDILAGLVGYVPSVPGMVVDEFQFSLTDGLHVDTGRMKIYTELPASDTPHLAINQGLQLSAGSVARITEQHLKVTDIDSDDHQVMYIMKEDPGAGRLQMMKHGNLEQISIKGPIRSFTQADISQGHVEYSHGTGEPGGSFAFKFDVVDGEGNRLIDKSFSISILEDKSPPVITTNKGLVLDENSVKKITTLQLSATDQDSGPTELIYRITRQPQLGHLEHAASPGIQISSFTQADLTSRNVQYVHSSEAEKHSDAFSFTLSDGVSEVTQTFHITLHPVDDSLPVVQNLGMRVQEGMRKTITEFELKAVDADTEAESVTFTIVQPPRHGTIERTSNGQHFHLTSTFTMKDIYQNRVSYSHDGSNSLKDRFTFTVSDGTNPFFIIEEGGKEIMTAAPQPFRVDILPVDDGTPRIVTNLGLQWLEYMDGKATNLITKKELLTMDPDTEDAQLVYEITTGPKHGFVENKLQPGRAAATFTQEDVNLGLIRYVLHKEKIREMMDSFQFLVKDSKPNVVSDNVFHIQWSLISFKYTSYNVSEKAGSVSVTVQRTGNLNQYAIVLCRTEQGTASSSSRVSSQPGQQDYVEYAGQVQFDEREDTKSCTIVINDDDVFENVESFTVELSMPAYALLGEFTQAKVIINDTEDEPTLEFDKKIYWVNESAGFLFAPIERKGDASSIVSAICYTVPKSAMGSSLYALESGSDFKSRGMSAASRVIFGPGVTMSTCDVMLIDDSEYEEEEEFEIALADASDNARIGRVATAKVLISGPNDASTVSLGNTAFTVSEDAGTVKIPVIRHGTDLSTFASVWCATRPSDPASATPGVDYVPSSRKVEFGPGVIEQYCTLTILDDTQYPVIEGLETFVVFLSSAQGAELTKPFQAVIAINDTFQDVPSMQFAKDLLLVKEKEGVLHVPITRSGDLSYESSVRCYTQSHSAQVMEDFEERQNADSSRITFLKGDKVKNCTVYIHDDSMFEPEEQFRVYLGLPLGNHWSGARIGKNNMATITISNDEDAPTIEFEEAAYQVREPAGPDAIAILNIKVIRRGDQNRTSKVRCSTRDGSAQSGVDYYPKSRVLKFSPGVDHIFFKVEILSNEDREWHESFSLVLGPDDPVEAVLGDVTTATVTILDQEAAGSLILPAPPIVVTLADYDHVEEVTKEGVKKSPSPGYPLVCVTPCDPHFPRYAVMKERCSEAGINQTSVQFSWEVAAPTDGNGARSPFETITDNTPFTSVNHMVLDSIYFSRRFHVRCVAKAVDKVGHVGTPLRSNIVTIGTDSAICHTPVVAGTSRGFQAQSFIATLKYLDVKHKEHPNRIHISVQIPHQDGMLPLISTMPLHNLHFLLSESIYRHQHVCSNLVTTYDLRGISEAGFLDDVVYDSTALGPGYDRPFQFDPSVREPKTIQLYKHLNLKSCVWTFDAYYDMTELIDVCGGSVTADFQVRDSAQSFLTVHVPLYVSYIYVTAPRGWASLEHHTEMEFSFFYDTVLWRTGIQTDSVLSARLQIIRIYIREDGRLVIEFKTHAKFRGQFVMEHHTLPEVKSFVLTPDHLGGIEFDLQLLWSAQTFDSPHQLWRATSSYNRKDYSGEYTIYLIPCTVQPTQPWVDPGEKPLACTAHAPERFLIPIAFQQTNRPVPVVYSLNTEFQLCNNEKVFLMDPNTSDMSLAEMDYKGAFSKGQILYGRVLWNPEQNLNSAYKLQLEKVYLCTGKDGYVPFFDPTGTIYNEGPQYGCIQPNKHLKHRFLLLDRNQPEVTDKYFHDVPFEAHFASELPDFHVVSNMPGVDGFTLKVDALYKVEAGHQWYLQVIYIIGPDTISGPRVQRSLTAPLRRNRRDLVEPDGQLILDDSLIYDNEGDQVKNGTNMKSLNLEMQELAVAASLSQTGASIGSALAAIMLLLLVFLVACFINRKCQKQRKKKPAEDILEEYPLNTKVEVPKRHPDRVEKNVNRHYCTVRNVNILSEPEAAYTFKGAKVKRLNLEVRVHNNLQDGTEV

SEQ ID NO: 19441 - protein, 1194 aa, Artificial Sequence
  Synthetic polypeptide
VLHATKTKTKKPPGQINLGLTRLHKDCHHLCQHCAADLHNTGSICLRCQNAHYLLLGDHCVPDCPSGYYAERGACKKCHSSCRTCQGRGPFSCSSCDTNLVLSHTGTCSTTCFPGHYLDDNHVCQPCNTHCGSCDSQASCTSCRDPNKVLLFGECQYESCAPQYYLDFSTNTCKECDWSCSACSGPLKTDCLQCMDGYVLQDGACVEQCLSSFYQDSGLCKNCDSYCLQCQGPHECTRCKGPFLLLEAQCVQECGKGYFADHAKHKCTACPQGCLQCSHRDRCHLCDHGFFLKSGLCVYNCVPGFSVHTSNETCSGKIHTPSLHVNGSLILPIGSIKPLDFSLLNVQDQEGRVEDLLFHVVSTPTNGQLVLSRNGKEVQLDKAGRFSWKDVNEKKVRFVHSKEKLRKGYLFLKISDQQFFSEPQLINIQAFSTQAPYVLRNEVLHISRGERATITTQMLDIRDDDNPQDVVIEIIDPPLHGQLLQTLQSPATPIYQFQLDELSRGLLHYAHDGSDSTSDVAVLQANDGHSFHNILFQVKTVPQNDRGLQLVANSMVWVPEGGMLQITNRILQAEAPGASAEEIIYKITQDYPQFGEVVLLVNMPADSPADEGQHLPDGRTATPTSTFTQQDINEGIVWYRHSGAPAQSDSFRFEVSSASNAQTRLESHMFNIAILPQTPEAPKVSLEASLHMTAREDGLTVIQPHSLSFINSEKPSGKIVYNITLPLHPNQGIIEHRDHPHSPIRYFTQEDINQGKVMYRPPPAAPHLQELMAFSFAGLPESVKFHFTVSDGEHTSPEMVLTIHLLPSDQQLPVFQVTAPRLAVSPGGSTSVGLQVVVRDAETAPKELFFELRRPPQHGVLLKHTAEFRRPMATGDTFTYEDVEKNALQYIHDGSSTREDSMEISVTDGLTVTMLEVRVEVSLSEDRGPRLAAGSSLSITVASKSTAIITRSHLAYVDDSSPDPEIWIQLNYLPSYGTLLRISGSEVEELSEVSNFTMEDINNKKIRYSAVFETDGHLVTDSFYFSVSDMDHNHLDNQIFTIMITPAENPPPVIAFADLITVDEGGRAPLSFHHFFATDDDDNLQRDAIIKLSALPKYGCIENTGTGDRFGPETASDLEASFPIQDVLENYIYYFQSVHESIEPTHDIFSFYVSDGTSRSEIHSINITIEVKTLEVGKVEPLTTIFHTIRELSL

SEQ ID NO: 19442 - protein, 444 aa, Artificial Sequence
  Synthetic polypeptide
GSPYNCRSGSVANNWIEIYNFVQQLAERFVSPEMRLSFIVFSSQATIILPLTGDRGKISKGLEDLKRVSPVGETYIHEGLKLANEQIQKAGGLKTSSIIIALTDGKLDGLVPSYAEKEAKISRSLGASVYCVGVLDFEQAQLERIADSKEQVFPVKGGFQALKGIINSILAQSCTEILELQPSSVCVGEEFQIVLSGRGFMLGSRNGSVLCTYTVNETYTTSVKPVSVQLNSMLCPAPILNKAGETLDVSVSFNGGKSVISGSLIVTATECSNGIAAIIVILVLLLLLGIGLMWWFWPLCCKVVIKDPPPPPAPAPKEEEEEPLPTKKWPTVDASYYGGRGVGGIKRMEVRWGDKGSTEEGARLEKAKNAVVKIPEETEEPIRPRPPRPKPTHQPPQTKWYTPIKGRLDALWALLRRQYDRVSLMRPQEGDEGRCINFSRVPSQ

SEQ ID NO: 19443 - protein, 445 aa, Artificial Sequence
  Synthetic polypeptide
GSPYNCRSGSVANNWIEIYNFVQQLAERFVSPEMRLSFIVFSSQATIILPLTGDRGKISKGLEDLKRVSPVGETYIHEGLKLANEQIQKAGGLKTSSIIIALTDGKLDGLVPSYAEKEAKISRSLGASVYCVGVLDFEQAQLERIADSKEQVFPVKGGFQALKGIINSILAQSCTEILELQPSSVCVGEEFQIVLSGRGFMLGSRNGSVLCTYTVNETYTTSVKPVSVQLNSMLCPAPILNKAGETLDVSVSFNGGKSVISGSLIVTATECSNGIAAIIVILVLLLLLGIGLMWWFWPLCCKVVIKDPPPPPAPAPKEEEEEPLPTKKWPTVDASYYGGRGVGGIKRMEVRWGDKGSTEEGARLEKAKNAVVKIPEETEEPIRPRPPRPKPTHQPPQTKWYTPIKGRLDALWALLRRQYDRVSLMRPQEGDEVCIWECIEKELTA

SEQ ID NO: 19444 - protein, 278 aa, Artificial Sequence
  Synthetic polypeptide
GSPYNCRSGSVANNWIEIYNFVQQLAERFVSPEMRLSFIVFSSQATIILPLTGDRGKISKGLEDLKRVSPVGETYIHEGLKLANEQIQKAGGLKTSSIIIALTDGKLDGLVPSYAEKEAKISRSLGASVYCVGVLDFEQAQLERIADSKEQVFPVKGGFQALKGIINSILAQSCTEILELQPSSVCVGEEFQIVLSGRGFMLGSRNGSVLCTYTVNETYTTSVKPVSVQLNSMLCPAPILNKAGEWGLTVTQAGVKWHDLTHCTFGLSGSGDPPTSAS

SEQ ID NO: 19445 - protein, 342 aa, Artificial Sequence
  Synthetic polypeptide
GSPYNCRSGSVANNWIEIYNFVQQLAERFVSPEMRLSFIVFSSQATIILPLTGDRGKISKGLEDLKRVSPVGETYIHEGLKLANEQIQKAGGLKTSSIIIALTDGKLDGLVPSYAEKEAKISRSLGASVYCVGVLDFEQAQLERIADSKEQVFPVKGGFQALKGIINSSNGIAAIIVILVLLLLLGIGLMWWFWPLCCKVVIKDPPPPPAPAPKEEEEEPLPTKKWPTVDASYYGGRGVGGIKRMEVRWGDKGSTEEGARLEKAKNAVVKIPEETEEPIRPRPPRPKPTHQPPQTKWYTPIKGRLDALWALLRRQYDRVSLMRPQEGDEVCIWECIEKELTA

SEQ ID NO: 19446 - protein, 33 aa, Artificial Sequence
  Synthetic polypeptide
MVTEEAPIIVGLGVWQITGLKFIISYSNLRRDL

SEQ ID NO: 19447 - protein, 28 aa, Artificial Sequence
  Synthetic polypeptide
GSPYNCLGVWQITGLKFIISYSNLRRDL

SEQ ID NO: 19448 - protein, 438 aa, Artificial Sequence
  Synthetic polypeptide
LSGSVANNWIEIYNFVQQLAERFVSPEMRLSFIVFSSQATIILPLTGDRGKISKGLEDLKRVSPVGETYIHEGLKLANEQIQKAGGLKTSSIIIALTDGKLDGLVPSYAEKEAKISRSLGASVYCVGVLDFEQAQLERIADSKEQVFPVKGGFQALKGIINSILAQSCTEILELQPSSVCVGEEFQIVLSGRGFMLGSRNGSVLCTYTVNETYTTSVKPVSVQLNSMLCPAPILNKAGETLDVSVSFNGGKSVISGSLIVTATECSNGIAAIIVILVLLLLLGIGLMWWFWPLCCKVVIKDPPPPPAPAPKEEEEEPLPTKKWPTVDASYYGGRGVGGIKRMEVRWGDKGSTEEGARLEKAKNAVVKIPEETEEPIRPRPPRPKPTHQPPQTKWYTPIKGRLDALWALLRRQYDRVSLMRPQEGDEGRCINFSRVPSQ

SEQ ID NO: 19449 - protein, 439 aa, Artificial Sequence
  Synthetic polypeptide
LSGSVANNWIEIYNFVQQLAERFVSPEMRLSFIVFSSQATIILPLTGDRGKISKGLEDLKRVSPVGETYIHEGLKLANEQIQKAGGLKTSSIIIALTDGKLDGLVPSYAEKEAKISRSLGASVYCVGVLDFEQAQLERIADSKEQVFPVKGGFQALKGIINSILAQSCTEILELQPSSVCVGEEFQIVLSGRGFMLGSRNGSVLCTYTVNETYTTSVKPVSVQLNSMLCPAPILNKAGETLDVSVSFNGGKSVISGSLIVTATECSNGIAAIIVILVLLLLLGIGLMWWFWPLCCKVVIKDPPPPPAPAPKEEEEEPLPTKKWPTVDASYYGGRGVGGIKRMEVRWGDKGSTEEGARLEKAKNAVVKIPEETEEPIRPRPPRPKPTHQPPQTKWYTPIKGRLDALWALLRRQYDRVSLMRPQEGDEVCIWECIEKELTA

SEQ ID NO: 19450 - protein, 272 aa, Artificial Sequence
  Synthetic polypeptide
LSGSVANNWIEIYNFVQQLAERFVSPEMRLSFIVFSSQATIILPLTGDRGKISKGLEDLKRVSPVGETYIHEGLKLANEQIQKAGGLKTSSIIIALTDGKLDGLVPSYAEKEAKISRSLGASVYCVGVLDFEQAQLERIADSKEQVFPVKGGFQALKGIINSILAQSCTEILELQPSSVCVGEEFQIVLSGRGFMLGSRNGSVLCTYTVNETYTTSVKPVSVQLNSMLCPAPILNKAGEWGLTVTQAGVKWHDLTHCTFGLSGSGDPPTSAS

SEQ ID NO: 19451 - protein, 336 aa, Artificial Sequence
  Synthetic polypeptide
LSGSVANNWIEIYNFVQQLAERFVSPEMRLSFIVFSSQATIILPLTGDRGKISKGLEDLKRVSPVGETYIHEGLKLANEQIQKAGGLKTSSIIIALTDGKLDGLVPSYAEKEAKISRSLGASVYCVGVLDFEQAQLERIADSKEQVFPVKGGFQALKGIINSSNGIAAIIVILVLLLLLGIGLMWWFWPLCCKVVIKDPPPPPAPAPKEEEEEPLPTKKWPTVDASYYGGRGVGGIKRMEVRWGDKGSTEEGARLEKAKNAVVKIPEETEEPIRPRPPRPKPTHQPPQTKWYTPIKGRLDALWALLRRQYDRVSLMRPQEGDEVCIWECIEKELTA

SEQ ID NO: 19452 - protein, 15 aa, Artificial Sequence
  Synthetic polypeptide
MVTEEAPIIVWECGK

SEQ ID NO: 19453 - protein, 74 aa, Artificial Sequence
  Synthetic polypeptide
GLCGGTTKPTVAKETRGDASEGTDAALTAWRLPSSPAGFPPGGFIPKTATTPKGSSSWQTSRPPAQGASWPPQA

SEQ ID NO: 19454 - protein, 250 aa, Artificial Sequence
  Synthetic polypeptide
GLCGGTTKPTVAKETRGDASEGTDAALTAWRLPSSPAGFPPGGFIPKTATTPKGSSSWQTSRPPAQGASWPPQAKPPPKACTQPRPNYASNFSVIGAREERGVRAPSFAQKPKVSENDFEDLLSNQGFSSRSDKKGPKTIAEMRKQDLAKDTDPLKLKLLDWIEGKERNIRALLSTLHTVLWDGESRWTPVGMADLVAPEQVKKHYRRAVLAVHPDKAAGQPYEQHAKMIFMELNDAWSEFENQGSRPLF

SEQ ID NO: 19455 - protein, 78 aa, Artificial Sequence
  Synthetic polypeptide
PDMSRACVVGLQNQPWRKRPEEMRVKGRTLHSRPGGSRAHQLDSLLGASFPKRPPRPKAAAPGRQVGRQPRAPHGPLR

SEQ ID NO: 19456 - protein, 98 aa, Artificial Sequence
  Synthetic polypeptide
PDMSRACVVGLQNQPWRKRPEEMRVKGRTLHSRPGGSRAHQLDSLLGASFPKRPPRPKAAAPGRQVGRQPRAPHGPLRPSRPPKPAHSQGLTMPRTSV

SEQ ID NO: 19457 - protein, 53 aa, Artificial Sequence
  Synthetic polypeptide
RDGRCTHGLEAPELTSWIPSWGLHSQNGHHAQRQQLLADKSAASPGRLMAPSG

SEQ ID NO: 19458 - protein, 65 aa, Artificial Sequence
  Synthetic polypeptide
RDGRCTHGLEAPELTSWIPSWGLHSQNGHHAQRQQLLADKSAASPGRLMAPSGQAAPQSLHTAKA

SEQ ID NO: 19459 - protein, 786 aa, Artificial Sequence
  Synthetic polypeptide
KPTRVHTGQNSCKPSTEEVLEVARRRCIRYIEYMCDMVAEEPITPHSKPILVRAVVMTPVPLFSKQRSGCRPFCEVYVGDERVASTSQEYDKMRDFKIEDGKAVIPLGVTVQGDVLIVIYHARSTLGGRLQAKMASMKMFQIQFHTGFVPRNATTVKFAKYDLDACDIQEKYPDLFQVNLEVEVEPRDRPSREAPPWENSSMRGLNPKILFSSREEQQDILSKFGKPELPRQPGSTAQYDAGAGSPEAEPTDSDSPPSSSADASRFLHTLDWQEEKEAETGAENASSKESESALMEDRDESEVSDEGGSPISSEGQEPRADPEPPGLAAGLVQQDLVFEVETPAVLPEPVPQEDGVDLLGLHSEVGAGPAVPPQACKAPSSNTDLLSCLLGPPEAASQGPPEDLLSEDPLLLASPAPPLSVQSTPRGGPPAAADPFGPLLPSSGNNSQPCSNPDLFGEFLNSDSVTVPPSFPSAHSAPPPSCSADFLHLGDLPGEPSKMTASSSNPDLLGGWAAWTETAASAVAPTPATEGPLFSPGGQPAPCGSQASWTKSQNPDPFADLGDLSSGLQGSPAGFPPGGFIPKTATTPKGSSSWQTSRPPAQGASWPPQAKPPPKACTQPRPNYASNFSVIGAREERGVRAPSFAQKPKVSENDFEDLLSNQGFSSRSDKKGPKTIAEMRKQDLAKDTDPLKLKLLDWIEGKERNIRALLSTLHTVLWDGESRWTPVGMADLVAPEQVKKHYRRAVLAVHPDKAAGQPYEQHAKMIFMELNDAWSEFENQGSRPLF

SEQ ID NO: 19460 - protein, 41 aa, Artificial Sequence
  Synthetic polypeptide
KQDEHMKTHSGAYRSELLQTEHRGSVGGGQKKMHQVHRVHV

SEQ ID NO: 19461 - protein, 54 aa, Artificial Sequence
  Synthetic polypeptide
THENPLGCIPVRTPANRAQRKCWRWPEEDASGTSSTCVTWWRRSPSHPTASPSW

SEQ ID NO: 19462 - protein, 32 aa, Artificial Sequence
  Synthetic polypeptide
GDLRHDELQCVLLHPDDVTALPRHPRVQNGEN

SEQ ID NO: 19463 - protein, 768 aa, Artificial Sequence
  Synthetic polypeptide
YTFYRNHTFNFEFWSFSRLPYSKDRATDPSQPCDYEVTYGMMSSNVYYYTRMMSQLFLDTPVSKTEKTNFKTLSSMEDFWKFTEGSLLDGLYWKMQPSNQTEADNRSFIFYENLLLGVPRIRQLRVRNGSCSIPQDLRDEIKECYDVYSVSSEDRAPFGPRNGTAWIYTSEKDLNGSSHWGIIATYSGAGYYLDLSRTREETAAQVASLKKNVWLDRGTRATFIDFSVYNANINLFCVVRLLVEFPATGGVIPSWQFQPLKLIRYVTTFDFFLAACEIIFCFFIFYYVVEEILEIRIHKLHYFRSFWNCLDVVIVVLSVVAIGINIYRTSNVEVLLQFLEDQNTFPNFEHLAYWQIQFNNIAAVTVFFVWIKLFKFINFNRTMSQLSTTMSRCAKDLFGFAIMFFIIFLAYAQLAYLVFGTQVDDFSTFQECIFTQFRIILGDINFAEIEEANRVLGPIYFTTFVFFMFFILLNMFLAIINDTYSEVKSDLAQQKAEMELSDLIRKGYHKALVKLKLKKNTVDDISESLRQGGGKLNFDELRQDLKGKGHTDAEIEAIFTKYDQDGDQELTEHEHQQMRDDLEKEREDLDLDHSSLPRPMSSRSFPRSLDDSEEDDDEDSGHSSRRRGSISSGVSYEEFQVLVRRVDRMEHSIGSIVSKIDAVIVKLEIMERAKLKRREVLGRLLDGVAEDERLGRDSEIHREQMERLVREELERWESDDAASQISHGLGTPVGLNGQPRPRSSRPSSSQSTEGMEGAGGNGSSNVHV

SEQ ID NO: 19464 - protein, 171 aa, Artificial Sequence
  Synthetic polypeptide
FGEIPFYHVWSGSQRNLHCTFTLERFSLNTVELVCKLCVRQVEGEGQIFQLNCTVSEEPTGIDLPLLDPANTITTVTGPSAFSIPLPIRQKLCSSLDAPQTRGHDWRMLAHKLNLDRYLNYFATKSSPTGVILDLWEAQNFPDGNLSMLAAVLEEMGRHETVVSLAAEGQY

SEQ ID NO: 19465 - protein, 55 aa, Artificial Sequence
  Synthetic polypeptide
VADWLGTWILEADSLGSNLSPATYLLCDLGKFHFTMFGVDLKETCTAPSLWKDLA

SEQ ID NO: 19466 - protein, 38 aa, Artificial Sequence
  Synthetic polypeptide
VQISALLLTCCVIWGNSILPCLEWISKKPALHLHSGKI

SEQ ID NO: 19467 - protein, 10 aa, Artificial Sequence
  Synthetic polypeptide
FLHFHLSFWE

SEQ ID NO: 19468 - protein, 101 aa, Artificial Sequence
  Synthetic polypeptide
GRSQDGRIGTAPVYSSQRERRRRRVISAFPSEFLGITFLGIGLWAWNEKGVLSNISSITDLGGFDPVWLFLVVGGVMFILGFAGCIGALRENTFLLKFDKQ

SEQ ID NO: 19469 - protein, 198 aa, Artificial Sequence
  Synthetic polypeptide
GRSQDGRIGTAPVYSSQRERRRRRVISAFPSEFLGITFLGIGLWAWNEKGVLSNISSITDLGGFDPVWLFLVVGGVMFILGFAGCIGALRENTFLLKFFSVFLGIIFFLELTAGVLAFVFKDWIKDQLYFFINNNIRAYRDDIDLQNLIDFTQEYIPMQVESDVAFHSPAALKIPQKMSSTLSVAMMPGKNQKLTSRL

SEQ ID NO: 19470 - protein, 273 aa, Artificial Sequence
  Synthetic polypeptide
GRSQDGRIGTAPVYSSQRERRRRRVISAFPSEFLGITFLGIGLWAWNEKGVLSNISSITDLGGFDPVWLFLVVGGVMFILGFAGCIGALRENTFLLKFFSVFLGIIFFLELTAGVLAFVFKDWIKDQLYFFINNNIRAYRDDIDLQNLIDFTQEYWQCCGAFGADDWNLNIYFNCTDSNASRERCGVPFSCCTKDPAEDVINTQCGYDARQKPEVDQQIVIYTKGCVPQFEKWLQDNLTIVAGIFIGIALLQIFGICLAQNLVSDIEAVRASW

SEQ ID NO: 19471 - protein, 15 aa, Artificial Sequence
  Synthetic polypeptide
VFGNNISWNWTVGME

SEQ ID NO: 19472 - protein, 89 aa, Artificial Sequence
  Synthetic polypeptide
ASPDAESAGALILDLPTSRTFLGITFLGIGLWAWNEKGVLSNISSITDLGGFDPVWLFLVVGGVMFILGFAGCIGALRENTFLLKFDKQ

SEQ ID NO: 19473 - protein, 186 aa, Artificial Sequence
  Synthetic polypeptide
ASPDAESAGALILDLPTSRTFLGITFLGIGLWAWNEKGVLSNISSITDLGGFDPVWLFLVVGGVMFILGFAGCIGALRENTFLLKFFSVFLGIIFFLELTAGVLAFVFKDWIKDQLYFFINNNIRAYRDDIDLQNLIDFTQEYIPMQVESDVAFHSPAALKIPQKMSSTLSVAMMPGKNQKLTSRL

SEQ ID NO: 19474 - protein, 261 aa, Artificial Sequence
  Synthetic polypeptide
ASPDAESAGALILDLPTSRTFLGITFLGIGLWAWNEKGVLSNISSITDLGGFDPVWLFLVVGGVMFILGFAGCIGALRENTFLLKFFSVFLGIIFFLELTAGVLAFVFKDWIKDQLYFFINNNIRAYRDDIDLQNLIDFTQEYWQCCGAFGADDWNLNIYFNCTDSNASRERCGVPFSCCTKDPAEDVINTQCGYDARQKPEVDQQIVIYTKGCVPQFEKWLQDNLTIVAGIFIGIALLQIFGICLAQNLVSDIEAVRASW

SEQ ID NO: 19475 - protein, 12 aa, Artificial Sequence
  Synthetic polypeptide
FWTSPPPELFWE

SEQ ID NO: 19476 - protein, 29 aa, Artificial Sequence
  Synthetic polypeptide
ICWSLDFGPPHLQNFFGNNISWNWTVGME

SEQ ID NO: 19477 - protein, 331 aa, Artificial Sequence
  Synthetic polypeptide
DMPSSSAMIVKPPQPWGTESTWPYLFGVIVVPAVVQLLSLPFLPDSPRYLLLEKHNEARAVKAFQTFLGKADVSQEVEEVLAESRVQRSIRLVSVLELLRAPYVRWQVVTVIVTMACYQLCGLNAIWFYTNSIFGKAGIPPAKIPYVTLSTGGIETLAAVFSGLVIEHLGRRPLLIGGFGLMGLFFGTLTITLTLQDHAPWVPYLSIVGILAIIASFCSGPGGIPFILTGEFFQQSQRPAAFIIAGTVNWLSNFAVGLLFPFIQKSLDTYCFLVFATICITGAIYLYFVLPETKNRTYAEISQAFSKRNKAYPPEEKIDSAVTDGKINGRP

SEQ ID NO: 19478 - protein, 17 aa, Artificial Sequence
  Synthetic polypeptide
SLPSHGELRVPGHTCLE

SEQ ID NO: 19479 - protein, 53 aa, Artificial Sequence
  Synthetic polypeptide
EDGHLQAGKRGLTRNRVCWHQNLGLGRSPKQCGVWSYRCQHWRFSEGISTENH

SEQ ID NO: 19480 - protein, 634 aa, Artificial Sequence
  Synthetic polypeptide
GHSEKMDICKPGREASPETEYAGTRILDLAGLQNSVVFGLIDVSIGDFQKEYQLKTIEKLALEKSYDISSGLVAIFIAFYGDRKKVIWFVASSFLIGLGSLLCAFPSINEENKQSKVGIEDICEEIKVVSGCQSSGISFQSKYLSFFILGQTVQGIAGMPLYILGITFIDENVATHSAGIYLGIAECTSMIGYALGYVLGAPLVKVPENTTSATNTTVNNGSPEWLWTWWINFLFAAVVAWCTLIPLSCFPNNMPGSTRIKARKRKQLHFFDSRLKDLKLGTNIKDLCAALWILMKNPVLICLALSKATEYLVIIGASEFLPIYLENQFILTPTVATTLAGLVLIPGGALGQLLGGVIVSTLEMSCKALMRFIMVTSVISLILLVFIIFVRCNPVQFAGINEDYDGTGKLGNLTAPCNEKCRCSSSIYSSICGRDDIEYFSPCFAGCTYSKAQNQKKMYYNCSCIKEGLITADAEGDFIDARPGKCDAKCYKLPLFIAFIFSTLIFSGFSGVPIVLAMTRVVPDKLRSLALGVSYVILRIFGTIPGPSIFKMSGETSCILRDVNKCGHTGRCWIYNKTKMAFLLVGICFLCKLCTIIFTTIAFFIYKRRLNENTDFPDVTVKNPKVKKKEETDL

SEQ ID NO: 19481 - protein, 381 aa, Artificial Sequence
  Synthetic polypeptide
GHSEKMDICKPGREASPETEYAGTRILDLAGLQNSVVFGLIDVSIGDFQKEYQLKTIEKLALEKSYDISSGLVAIFIAFYGDRKKVIWFVASSFLIGLGSLLCAFPSINEENKQSKVGIEGIAECTSMIGYALGYVLGAPLVKVPENTTSATKTGKLGNLTAPCNEKCRCSSSIYSSICGRDDIEYFSPCFAGCTYSKAQNQKKMYYNCSCIKEGLITADAEGDFIDARPGKCDAKCYKLPLFIAFIFSTLIFSGFSGVPIVLAMTRVVPDKLRSLALGVSYVILRIFGTIPGPSIFKMSGETSCILRDVNKCGHTGRCWIYNKTKMAFLLVGICFLCKLCTIIFTTIAFFIYKRRLNENTDFPDVTVKNPKVKKKEETDL

SEQ ID NO: 19482 - protein, 572 aa, Artificial Sequence
  Synthetic polypeptide
GHSEKMDICKPGREASPETEYAGTRILDLAGLQNSVVFGLIDVSIGDFQKEYQLKTIEKLALEKSYDISSGLVAIFIAFYGDRKKVIWFVASSFLIGLGSLLCAFPSINEENKQSKVGIEGIAECTSMIGYALGYVLGAPLVKVPENTTSATNTTVNNGSPEWLWTWWINFLFAAVVAWCTLIPLSCFPNNMPGSTRIKARKRKQLHFFDSRLKDLKLGTNIKDLCAALWILMKNPVLICLALSKATEYLVIIGASEFLPIYLENQFILTPTVATTLAGLVLIPGGALGQLLGGVIVSTLEMSCKALMRFIMVTSVISLILLVFIIFVRCNPVQFAGINEDYDGTGKLGNLTAPCNEKCRCSSSIYSSICGRDDIEYFSPCFAGCTYSKAQNQKKMYYNCSCIKEGLITADAEGDFIDARPGKCDAKCYKLPLFIAFIFSTLIFSGFSGVPIVLAMTRVVPDKLRSLALGVSYVILRIFGTIPGPSIFKMSGETSCILRDVNKCGHTGRCWIYNKTKMAFLLVGICFLCKLCTIIFTTIAFFIYKRRLNENTDFPDVTVKNPKVKKKEETDL

SEQ ID NO: 19483 - protein, 43 aa, Artificial Sequence
  Synthetic polypeptide
PCEDTVRRWTSASREERPHQKQSMLAPESWTWPVSKTVWCLVL

SEQ ID NO: 19484 - protein, 98 aa, Artificial Sequence
  Synthetic polypeptide
RHMHMYVYCGTIHNSKDLEPTQCPTVIDWIKKIWHIYTMEYYAAIKKDEFMSFVGTWMKLETIILSRLSQGQKTKHRVFSPIGKETEKAKERYDKATM

SEQ ID NO: 19485 - protein, 248 aa, Artificial Sequence
  Synthetic polypeptide
RHMHMYVYCGTIHNSKDLEPTQCPTVIDWIKKIWHIYTMEYYAAIKKDEFMSFVGTWMKLETIILSRLSQGQKTKHRVFSPIGKETEKAKERYDKATMKLHMLHNQYVLALKGAQLHQNQYYDITLPLLLDSLQKMQEEMIKALKGIFDEYSQITSLVTEEIVNVHKEIQMSVEQIDPSTEYNNFIDVHRTTAAKEQEIEFDTSLLEENENLQANEIMWNNLTAESLQVMKERRGYPNLNLFVIQLLE

SEQ ID NO: 19486 - protein, 744 aa, Artificial Sequence
  Synthetic polypeptide
RHMHMYVYCGTIHNSKDLEPTQCPTVIDWIKKIWHIYTMEYYAAIKKDEFMSFVGTWMKLETIILSRLSQGQKTKHRVFSPIGKETEKAKERYDKATMKLHMLHNQYVLALKGAQLHQNQYYDITLPLLLDSLQKMQEEMIKALKGIFDEYSQITSLVTEEIVNVHKEIQMSVEQIDPSTEYNNFIDVHRTTAAKEQEIEFDTSLLEENENLQANEIMWNNLTAESLQVMLKTLAEELMQTQQMLLNKEEAVLELEKRIEESSETCEKKSDIVLLLSQKQALEELKQSVQQLRCTEAKFSAQKELLEQKVQENDGKEPPPVVNYEEDARSVTSMERKERLSKFESIRHSIAGIIRSPKSALGSSALSDMISISEKPLAEQDWYHGAIPRIEAQELLKKQGDFLVRESHGKPGEYVLSVYSDGQRRHFIIQYVDNMYRFEGTGFSNIPQLIDHHYTTKQVITKKSGVVLLNPIPKDKKWILSHEDVILGELLGKGNFGEVYKGTLKDKTSVAVKTCKEDLPQELKIKFLQEAKILKQYDHPNIVKLIGVCTQRQPVYIIMELVSGGDFLTFLRRKKDELKLKQLVKFSLDAAAGMLYLESKNCIHRDLAARNCLVGENNVLKISDFGMSRQEDGGVYSSSGLKQIPIKWTAPEALNYGRYSSESDVWSFGILLWETFSLGVCPYPGMTNQQAREQVERGYRMSAPQHCPEDISKIMMKCWDYKPENRPKFSELQKELTIIKRKLT

SEQ ID NO: 19487 - protein, 11 aa, Artificial Sequence
  Synthetic polypeptide
TPRVLTHREGN

SEQ ID NO: 19488 - protein, 40 aa, Artificial Sequence
  Synthetic polypeptide
ASFLYKLPSLWTRNGFSVMKMSYWENYWAREILVKYIRAH

SEQ ID NO: 19489 - protein, 275 aa, Artificial Sequence
  Synthetic polypeptide
ITQSLDKKWILSHEDVILGELLGKGNFGEVYKGTLKDKTSVAVKTCKEDLPQELKIKFLQEAKILKQYDHPNIVKLIGVCTQRQPVYIIMELVSGGDFLTFLRRKKDELKLKQLVKFSLDAAAGMLYLESKNCIHRDLAARNCLVGENNVLKISDFGMSRQEDGGVYSSSGLKQIPIKWTAPEALNYGRYSSESDVWSFGILLWETFSLGVCPYPGMTNQQAREQVERGYRMSAPQHCPEDISKIMMKCWDYKPENRPKFSELQKELTIIKRKLT

SEQ ID NO: 19490 - protein, 59 aa, Artificial Sequence
  Synthetic polypeptide
TGVPLQVFSCLPPCETSLCFFFAFHHDCEASPAMWNCECIKPLSFINYPVFGQEMDSQS

SEQ ID NO: 19491 - protein, 59 aa, Artificial Sequence
  Synthetic polypeptide
KDTMKEALRPGKVTTVKSVELESRGHLRTSMKPAHMMLSGRMKVKEWEKSTWQLLVMVR

SEQ ID NO: 19492 - protein, 72 aa, Artificial Sequence
  Synthetic polypeptide
KDTMKEALRPGKVTTVKSVELESRGHLRTSMKPAHMMLSGRMKVKEWEKSTWQLLVMVRVQLHEWTMKQPVF

SEQ ID NO: 19493 - protein, 14 aa, Artificial Sequence
  Synthetic polypeptide
NPWSWKAEVISEQA

SEQ ID NO: 19494 - protein, 950 aa, Artificial Sequence
  Synthetic polypeptide
YTFTCVYSRNPIKVIVKGYNERGIKTREGDHSKIRGAGKQRSSQNKHETGSHDAERQNEGQGVGEINMATSGNGQGSTTRMDHETASVLSSSSTHSAPRRLTSHLGTKVEMVYSLLSMLGTHDKDDMSRTLLAMSSSQDSCISMRQSGCLPLLIQLLHGNDKDSVLLGNSRGSKEARARASAALHNIIHSQPDDKRGRREIRVLHLLEQIRAYCETCWEWQEAHEPGMDQDKNPMPAPVEHQICPAVCVLMKLSFDEEHRHAMNELGGLQAIAELLQVDCEMYGLTNDHYSITLRRYAGMALTNLTFGDVANKATLCSMKGCMRALVAQLKSESEDLQQVIASVLRNLSWRADVNSKKTLREVGSVKALMECALEVKKESTLKSVLSALWNLSAHCTENKADICAVDGALAFLVGTLTYRSQTNTLAIIESGGGILRNVSSLIATNEDHRQILRENNCLQTLLQHLKSHSLTIVSNACGTLWNLSARNPKDQEALWDMGAVSMLKNLIHSKHKMIAMGSAAALRNLMANRPAKYKDANIMSPGSSLPSLHVRKQKALEAELDAQHLSETFDNIDNLSPKASHRSKQRHKQSLYGDYVFDTNRHDDNRSDNFNTGNMTVLSPYLNTTVLPSSSSSRGSLDSSRSEKDRSLERERGIGLGNYHPATENPGTSSKRGLQISTTAAQIAKVMEEVSAIHTSQEDRSSGSTTELHCVTDERNALRRSSAAHTHSNTYNFTKSENSNRTCSMPYAKLEYKRSSNDSLNSVSSSDGYGKRGQMKPSIESYSEDDESKFCSYGQYPADLAHKIHSANHMDDNDGELDTPINYSLKYSDEQLNSGRQSPSQNERWARPKHIIEDEIKQSEQRQSRNQSTTYPVYTESTDDKHLKFQPHFGQQECVSPYRSRGANGSETNRVGSNHGINQNVSQSLCQEDDYEDDKPTNYSERYSEEEQH

SEQ ID NO: 19495 - protein, 1101 aa, Artificial Sequence
  Synthetic polypeptide
YTFTCVYSRNPIKVIVKGYNERGIKTREGDHSKIRGAGKQRSSQNKHETGSHDAERQNEGQGVGEINMATSGNGQGSTTRMDHETASVLSSSSTHSAPRRLTSHLGTKVEMVYSLLSMLGTHDKDDMSRTLLAMSSSQDSCISMRQSGCLPLLIQLLHGNDKDSVLLGNSRGSKEARARASAALHNIIHSQPDDKRGRREIRVLHLLEQIRAYCETCWEWQEAHEPGMDQDKNPMPAPVEHQICPAVCVLMKLSFDEEHRHAMNELGGLQAIAELLQVDCEMYGLTNDHYSITLRRYAGMALTNLTFGDVANKATLCSMKGCMRALVAQLKSESEDLQQVIASVLRNLSWRADVNSKKTLREVGSVKALMECALEVKKESTLKSVLSALWNLSAHCTENKADICAVDGALAFLVGTLTYRSQTNTLAIIESGGGILRNVSSLIATNEDHRQILRENNCLQTLLQHLKSHSLTIVSNACGTLWNLSARNPKDQEALWDMGAVSMLKNLIHSKHKMIAMGSAAALRNLMANRPAKYKDANIMSPGSSLPSLHVRKQKALEAELDAQHLSETFDNIDNLSPKASHRSKQRHKQSLYGDYVFDTNRHDDNRSDNFNTGNMTVLSPYLNTTVLPSSSSSRGSLDSSRSEKDRSLERERGIGLGNYHPATENPGTSSKRGLQISTTAAQIAKVMEEVSAIHTSQEDRSSGSTTELHCVTDERNALRRSSAAHTHSNTYNFTKSENSNRTCSMPYAKLEYKRSSNDSLNSVSSSDGYGKRGQMKPSIESYSEDDESKFCSYGQYPADLAHKIHSANHMDDNDGELDTPINYSLKYSDEQLNSGRQSPSQNERWARPKHIIEDEIKQSEQRQSRNQSTTYPVYTESTDDKHLKFQPHFGQQECVSPYRSRGANGSETNRVGSNHGINQNVSQSLCQEDDYEDDKPTNYSERYSEEEQHEEEERPTNYSIKYNEEKRHVDQPIDYSLKYATDIPSSQKQSFSFSKSSSGQSSKTEHMSSSSENTSTPSSNAKRQNQLHPSSAQSRSGQPQKAATCKVSSINQETIQTYCVEDTPICFSRCSSLSSLSSAEDEIGCNQTTQEADSANTLQI

SEQ ID NO: 19496 - protein, 2640 aa, Artificial Sequence
  Synthetic polypeptide
YTFTCVYSRNPIKVIVKGYNERGIKTREGDHSKIRGAGKQRSSQNKHETGSHDAERQNEGQGVGEINMATSGNGQGSTTRMDHETASVLSSSSTHSAPRRLTSHLGTKVEMVYSLLSMLGTHDKDDMSRTLLAMSSSQDSCISMRQSGCLPLLIQLLHGNDKDSVLLGNSRGSKEARARASAALHNIIHSQPDDKRGRREIRVLHLLEQIRAYCETCWEWQEAHEPGMDQDKNPMPAPVEHQICPAVCVLMKLSFDEEHRHAMNELGGLQAIAELLQVDCEMYGLTNDHYSITLRRYAGMALTNLTFGDVANKATLCSMKGCMRALVAQLKSESEDLQQVIASVLRNLSWRADVNSKKTLREVGSVKALMECALEVKKESTLKSVLSALWNLSAHCTENKADICAVDGALAFLVGTLTYRSQTNTLAIIESGGGILRNVSSLIATNEDHRQILRENNCLQTLLQHLKSHSLTIVSNACGTLWNLSARNPKDQEALWDMGAVSMLKNLIHSKHKMIAMGSAAALRNLMANRPAKYKDANIMSPGSSLPSLHVRKQKALEAELDAQHLSETFDNIDNLSPKASHRSKQRHKQSLYGDYVFDTNRHDDNRSDNFNTGNMTVLSPYLNTTVLPSSSSSRGSLDSSRSEKDRSLERERGIGLGNYHPATENPGTSSKRGLQISTTAAQIAKVMEEVSAIHTSQEDRSSGSTTELHCVTDERNALRRSSAAHTHSNTYNFTKSENSNRTCSMPYAKLEYKRSSNDSLNSVSSSDGYGKRGQMKPSIESYSEDDESKFCSYGQYPADLAHKIHSANHMDDNDGELDTPINYSLKYSDEQLNSGRQSPSQNERWARPKHIIEDEIKQSEQRQSRNQSTTYPVYTESTDDKHLKFQPHFGQQECVSPYRSRGANGSETNRVGSNHGINQNVSQSLCQEDDYEDDKPTNYSERYSEEEQHEEEERPTNYSIKYNEEKRHVDQPIDYSLKYATDIPSSQKQSFSFSKSSSGQSSKTEHMSSSSENTSTPSSNAKRQNQLHPSSAQSRSGQPQKAATCKVSSINQETIQTYCVEDTPICFSRCSSLSSLSSAEDEIGCNQTTQEADSANTLQIAEIKEKIGTRSAEDPVSEVPAVSQHPRTKSSRLQGSSLSSESARHKAVEFSSGAKSPSKSGAQTPKSPPEHYVQETPLMFSRCTSVSSLDSFESRSIASSVQSEPCSGMVSGIISPSDLPDSPGQTMPPSRSKTPPPPPQTAQTKREVPKNKAPTAEKRESGPKQAAVNAAVQRVQVLPDADTLLHFATESTPDGFSCSSSLSALSLDEPFIQKDVELRIMPPVQENDNGNETESEQPKESNENQEKEAEKTIDSEKDLLDDSDDDDIEILEECIISAMPTKSSRKAKKPAQTASKLPPPVARKPSQLPVYKLLPSQNRLQPQKHVSFTPGDDMPRVYCVEGTPINFSTATSLSDLTIESPPNELAAGEGVRGGAQSGEFEKRDTIPTEGRSTDEAQGGKTSSVTIPELDDNKAEEGDILAECINSAMPKGKSHKPFRVKKIMDQVQQASASSSAPNKNQLDGKKKKPTSPVKPIPQNTEYRTRVRKNADSKNNLNAERVFSDNKDSKKQNLKNNSKVFNDKLPNNEDRVRGSFAFDSPHHYTPIEGTPYCFSRNDSLSSLDFDDDDVDLSREKAELRKAKENKESEAKVTSHTELTSNQQSANKTQAIAKQPINRGQPKPILQKQSTFPQSSKDIPDRGAATDEKLQNFAIENTPVCFSHNSSLSSLSDIDQENNNKENEPIKETEPPDSQGEPSKPQASGYAPKSFHVEDTPVCFSRNSSLSSLSIDSEDDLLQECISSAMPKKKKPSRLKGDNEKHSPRNMGGILGEDLTLDLKDIQRPDSEHGLSPDSENFDWKAIQEGANSIVSSLHQAAAAACLSRQASSDSDSILSLKSGISLGSPFHLTPDQEEKPFTSNKGPRILKPGEKSTLETKKIESESKGIKGGKKVYKSLITGKVRSNSEISGQMKQPLQANMPSISRGRTMIHIPGVRNSSSSTSPVSKKGPPLKTPASKSPSEGQTATTSPRGAKPSVKSELSPVARQTSQIGGSSKAPSRSGSRDSTPSRPAQQPLSRPIQSPGRNSISPGRNGISPPNKLSQLPRTSSPSTASTKSSGSGKMSYTSPGRQMSQQNLTKQTGLSKNASSIPRSESASKGLNQMNNGNGANKKVELSRMSSTKSSGSESDRSERPVLVRQSTFIKEAPSPTLRRKLEESASFESLSPSSRPASPTRSQAQTPVLSPSLPDMSLSTHSSVQAGGWRKLPPNLSPTIEYNDGRPAKRHDIARSHSESPSRLPINRSGTWKREHSKHSSSLPRVSTWRRTGSSSSILSASSESSEKAKSEDEKHVNSISGTKQSKENQVSAKGTWRKIKENEFSPTNSTSQTVSSGATNGAESKTLIYQMAPAVSKTEDVWVRIEDCPINNPRSGRSPTGNTPPVIDSVSEKANPNIKDSKDNQAKQNVGNGSVPMRTVGLENRLNSFIQVDAPDQKGTEIKPGQNNPVPVSETNESSIVERTPFSSSSSSKHSSPSGTVAARVTPFNYNPSPRKSSADSTSARPSQIPTPVNNNTKKRDSKTDSTESSGTQSPKRHSGSYLVTSV

SEQ ID NO: 19497 - protein, 84 aa, Artificial Sequence
  Synthetic polypeptide
YTFTCVYSRNPIKVIVKGYNERGIKTREGDHSKIRGAGKQRSSQNKHETGSHDAERQNEGQGVGEINMATSGNGQIEKMRMFEC

SEQ ID NO: 19498 - protein, 151 aa, Artificial Sequence
  Synthetic polypeptide
GQVRWLTPVIPALWEAKECADAASPALSLAELRTTCSENELAAEFTNAIRREKKLKARVQELVSALERLTKSSEIRHQQSAEFVNDLKRANSNLVAAYEKAKKKHQNKLKKLESQMMAMVERHETQVRMLKQRIALLEEENSRPHTNETSL

SEQ ID NO: 19499 - protein, 19 aa, Artificial Sequence
  Synthetic polypeptide
PGAVAHACDPSTLGGQGVC

SEQ ID NO: 19500 - protein, 19 aa, Artificial Sequence
  Synthetic polypeptide
SQHFGRPRSVLMLPPQLCP

SEQ ID NO: 19501 - protein, 36 aa, Artificial Sequence
  Synthetic polypeptide
SRCSVSSIQNQMQSKGGYGGGMPANVQMQLVDTKAG

SEQ ID NO: 19502 - protein, 37 aa, Artificial Sequence
  Synthetic polypeptide
TVGAQLAPFRTKCSPREVMEVECLPMSRCSSWIRRRD

SEQ ID NO: 19503 - protein, 3 aa, Artificial Sequence
  Synthetic polypeptide
VLS

SEQ ID NO: 19504 - protein, 19 aa, Artificial Sequence
  Synthetic polypeptide
GLVQWLTPVILALWEAKFW

SEQ ID NO: 19505 - protein, 1421 aa, Artificial Sequence
  Synthetic polypeptide
HFGRPSFGKQFGGKRGCDCLVLEPSEMIVVENAKDNEDSILQREIPARQSRRRFRKINYKGERQTITDDVEVNSYLSLPADLTKMHLTENPHPQVTHVSSSQSGCSIASDSGSSSLSDIYQATESEVGDVDLTRLPEGPVDSEDDEEEDEEIDRTDPLQGRDLVRECLEKEPADKTDDDIEQLLEFMHQLPAFANMTMSVRRELCSVMIFEVVEQAGAIILEDGQELDSWYVILNGTVEISHPDGKVENLFMGNSFGITPTLDKQYMHGIVRTKVDDCQFVCIAQQDYWRILNHVEKNTHKVEEEGEIVMVHEHRELDRSGTRKGHIVIKATPERLIMHLIEEHSIVDPTYIEDFLLTYRTFLESPLDVGIKLLEWFKIDSLRDKVTRIVLLWVNNHFNDFEGDPAMTRFLEEFEKNLEDTKMNGHLRLLNIACAAKAKWRQVVLQKASRESPLQFSLNGGSEKGFGIFVEGVEPGSKAADSGLKRGDQIMEVNGQNFENITFMKAVEILRNNTHLALTVKTNIFVFKELLFRTEQEKSGVPHIPKIAEKKSNRHSIQHVPGDIEQTSQEKGSKKVKANTVSGGRNKIRKILDKTRFSILPPKLFSDGGLSQSQDDSIVGTRHCRHSLAIMPIPGTLSSSSPDLLQPTTSMLDFSNPSAVGFYYIPDQVIRVFKVDQQSCYIIISKDTTAKEVVFHAVHEFGLTGASDTYSLCEVSVTPEGVIKQRRLPDQFSKLADRIQLNGRYYLKNNMETETLCSDEDAQELVKESQLSMLQLSTIEVATQLSMRDFDLFRNIEPTEYIDDLFKLNSKTGNTHLKRFEDIVNQETFWVASEILTEANQLKRMKIIKHFIKIALHCRECKNFNSMFAIISGLNLASVARLRGTWEKLPSKYEKHLQDLQDIFDPSRNMAKYRNILSSQSMQPPIIPLFPVVKKDMTFLHEGNDSKVDGLVNFEKLRMISKEIRQVVRMTSANMDPAMMFRQRKKRWRSLGSLSQGSTNSNMLDVQGGAHKKRARRSSLLNAKKLYEDAQMARKVKQYLSSLDVETDEEKFQMMSLQWEPAYGTLTKNLSEKRSAKSSEMSPVPMRSAGQTTKAHLHQPHRVSQVLQVPAVNLHPIRKKGQTKDPALNTSLPQKVLGTTEEISGKKHTEDTISVASSLHSSPPASPQGSPHKGYTLIPSAKSDNLSDSSHSEISSRSSIVSNCSVDSMSAALQDERCSSQALAVPESTGALEKTEHASGIGDHSQHGPGWTLLKPSLIKCLAVSSSVSNEEISQEHIIIEAADSGRGSWTSCSSSSHDNFQSLPNPKSWDFLNSYRHTHLDDPIAEVEPTDSEPYSCSKSCSRTCGQCKGSLERKSWTSSSSLSDTYEPNYGTVKQRVLESTPAESSEGLDPKDATDPVYKTVTSSTEKGLIENEQVSAV

SEQ ID NO: 19506 - protein, 739 aa, Artificial Sequence
  Synthetic polypeptide
HFGRPSFGKQFGGKRGCDCLVLEPSEMIVVENAKDNEDSILQREIPARQSRRRFRKINYKGERQTITDDVEVNSYLSLPADLTKMHLTENPHPQVTHVSSSQSGCSIASDSGSSSLSDIYQATESEVGDVDLTRLPEGPVDSEDDEEEDEEIDRTDPLQGRDLVRECLEKEPADKTDDDIEQLLEFMHQLPAFANMTMSVRRELCSVMIFEVVEQAGAIILEDGQELDSWYVILNGTVEISHPDGKVENLFMGNSFGITPTLDKQYMHGIVRTKVDDCQFVCIAQQDYWRILNHVEKNTHKVEEEGEIVMVHEHRELDRSGTRKGHIVIKATPERLIMHLIEEHSIVDPTYIEDFLLTYRTFLESPLDVGIKLLEWFKIDSLRDKVTRIVLLWVNNHFNDFEGDPAMTRFLEEFEKNLEDTKMNGHLRLLNIACAAKAKWRQVVLQKASRESPLQFSLNGGSEKGFGIFVEGVEPGSKAADSGLKRGDQIMEVNGQNFENITFMKAVEILRNNTHLALTVKTNIFVFKELLFRTEQEKSGVPHIPKIAEKKSNRHSIQHVPGDIEQTSQEKGSKKVKANTVSGGRNKIRKILDKTRFSILPPKLFSDGGLSQSQDDSIVGTRHCRHSLAIMPIPGTLSSSSPDLLQPTTSMLDFSNPSDIPDQVIRVFKVDQQSCYIIISKDTTAKEVVFHAVHEFGLTGASDTYSLCEVSVTPEGVIKQRRLPDQFSKLADRIQLNGR

SEQ ID NO: 19507 - protein, 1416 aa, Artificial Sequence
  Synthetic polypeptide
HFGRPSFGKQFGGKRGCDCLVLEPSEMIVVENAKDNEDSILQREIPARQSRRRFRKINYKGERQTITDDVEVNSYLSLPADLTKMHLTENPHPQVTHVSSSQSGCSIASDSGSSSLSDIYQATESEVGDVDLTRLPEGPVDSEDDEEEDEEIDRTDPLQGRDLVRECLEKEPADKTDDDIEQLLEFMHQLPAFANMTMSVRRELCSVMIFEVVEQAGAIILEDGQELDSWYVILNGTVEISHPDGKVENLFMGNSFGITPTLDKQYMHGIVRTKVDDCQFVCIAQQDYWRILNHVEKNTHKVEEEGEIVMVHEHRELDRSGTRKGHIVIKATPERLIMHLIEEHSIVDPTYIEDFLLTYRTFLESPLDVGIKLLEWFKIDSLRDKVTRIVLLWVNNHFNDFEGDPAMTRFLEEFEKNLEDTKMNGHLRLLNIACAAKAKWRQVVLQKASRESPLQFSLNGGSEKGFGIFVEGVEPGSKAADSGLKRGDQIMEVNGQNFENITFMKAVEILRNNTHLALTVKTNIFVFKELLFRTEQEKSGVPHIPKIAEKKSNRHSIQHVPGDIEQTSQEKGSKKVKANTVSGGRNKIRKILDKTRFSILPPKLFSDGGLSQSQDDSIVGTRHCRHSLAIMPIPGTLSSSSPDLLQPTTSMLDFSNPSDIPDQVIRVFKVDQQSCYIIISKDTTAKEVVFHAVHEFGLTGASDTYSLCEVSVTPEGVIKQRRLPDQFSKLADRIQLNGRYYLKNNMETETLCSDEDAQELVKESQLSMLQLSTIEVATQLSMRDFDLFRNIEPTEYIDDLFKLNSKTGNTHLKRFEDIVNQETFWVASEILTEANQLKRMKIIKHFIKIALHCRECKNFNSMFAIISGLNLASVARLRGTWEKLPSKYEKHLQDLQDIFDPSRNMAKYRNILSSQSMQPPIIPLFPVVKKDMTFLHEGNDSKVDGLVNFEKLRMISKEIRQVVRMTSANMDPAMMFRQRKKRWRSLGSLSQGSTNSNMLDVQGGAHKKRARRSSLLNAKKLYEDAQMARKVKQYLSSLDVETDEEKFQMMSLQWEPAYGTLTKNLSEKRSAKSSEMSPVPMRSAGQTTKAHLHQPHRVSQVLQVPAVNLHPIRKKGQTKDPALNTSLPQKVLGTTEEISGKKHTEDTISVASSLHSSPPASPQGSPHKGYTLIPSAKSDNLSDSSHSEISSRSSIVSNCSVDSMSAALQDERCSSQALAVPESTGALEKTEHASGIGDHSQHGPGWTLLKPSLIKCLAVSSSVSNEEISQEHIIIEAADSGRGSWTSCSSSSHDNFQSLPNPKSWDFLNSYRHTHLDDPIAEVEPTDSEPYSCSKSCSRTCGQCKGSLERKSWTSSSSLSDTYEPNYGTVKQRVLESTPAESSEGLDPKDATDPVYKTVTSSTEKGLIENEQVSAV

SEQ ID NO: 19508 - protein, 1521 aa, Artificial Sequence
  Synthetic polypeptide
HFGRPSFGKQFGGKRGCDCLVLEPSEMIVVENAKDNEDSILQREIPARQSRRRFRKINYKGERQTITDDVEVNSYLSLPADLTKMHLTENPHPQVTHVSSSQSGCSIASDSGSSSLSDIYQATESEVGDVDLTRLPEGPVDSEDDEEEDEEIDRTDPLQGRDLVRECLEKEPADKTDDDIEQLLEFMHQLPAFANMTMSVRRELCSVMIFEVVEQAGAIILEDGQELDSWYVILNGTVEISHPDGKVENLFMGNSFGITPTLDKQYMHGIVRTKVDDCQFVCIAQQDYWRILNHVEKNTHKVEEEGEIVMVHEHRELDRSGTRKGHIVIKATPERLIMHLIEEHSIVDPTYIEDFLLTYRTFLESPLDVGIKLLEWFKIDSLRDKVTRIVLLWVNNHFNDFEGDPAMTRFLEEFEKNLEDTKMNGHLRLLNIACAAKAKWRQVVLQKASRESPLQFSLNGGSEKGFGIFVEGVEPGSKAADSGLKRGDQIMEVNGQNFENITFMKAVEILRNNTHLALTVKTNIFVFKELLFRTEQEKSGVPHIPKIAEKKSNRHSIQHVPGDIEQTSQEKGSKKVKANTVSGGRNKIRKILDKTRFSILPPKLFSDGGLSQSQDDSIVGTRHCRHSLAIMPIPGTLSSSSPDLLQPTTSMLDFSNPSDIPDQVIRVFKVDQQSCYIIISKDTTAKEVVFHAVHEFGLTGASDTYSLCEVSVTPEGVIKQRRLPDQFSKLADRIQLNGRYYLKNNMETETLCSDEDAQELVKESQLSMLQLSTIEVATQLSMRDFDLFRNIEPTEYIDDLFKLNSKTGNTHLKRFEDIVNQETFWVASEILTEANQLKRMKIIKHFIKIALHCRECKNFNSMFAIISGLNLASVARLRGTWEKLPSKYEKHLQDLQDIFDPSRNMAKYRNILSSQSMQPPIIPLFPVVKKDMTFLHEGNDSKVDGLVNFEKLRMISKEIRQVVRMTSANMDPAMMFRQRKKRWRSLGSLSQGSTNSNMLDVQGGAHKKRARRSSLLNAKKLYEDAQMARKVKQYLSSLDVETDEEKFQMMSLQWEPAYGTLTKNLSEKRSAKSSEMSPVPMRSAGQTTKAHLHQPHRVSQVLQVPAVNLHPIRKKGQTKDPALNTSLPQKVLGTTEEISGKKHTEDTISVASSLHSSPPASPQGSPHKGYTLIPSAKSDNLSDSSHSEISSRSSIVSNCSVDSMSAALQDERCSSQALAVPESTGALEKTEHASGIGDHSQHGPGWTLLKPSLIKCLAVSSSVSNEEISQEHIIIEAADSGRGSWTSCSSSSHDNFQSLPNPKSWDFLNSYRHTHLDDPIAEVEPTDSEPYSCSKSCSRTCGQCKGSLERKSWTSSSSLSDTYEPNYGTVKQRVLESTPAESSEGLDPKDATDPVYKTVTSSTEKGLIVYCVTSPKKDDRYREPPPTPPGYLGISLADLKEGPHTHLKPPDYSVAVQRSKMMHNSLSRLPPASLSSNLVACVPSKIVTQPQRHNLQPFHPKLGDVTDADSEADENEQVSAV

SEQ ID NO: 19509 - protein, 1116 aa, Artificial Sequence
  Synthetic polypeptide
HFGRPSFGKQFGGKRGCDCLVLEPSEMIVVENAKDNEDSILQREIPARQSRRRFRKINYKGERQTITDDVEVNSYLSLPADLTKMHLTENPHPQVTHVSSSQSGCSIASDSGSSSLSDIYQATESEVGDVDLTRLPEGPVDSEDDEEEDEEIDRTDPLQGRDLVRECLEKEPADKTDDDIEQLLEFMHQLPAFANMTMSVRRELCSVMIFEVVEQAGAIILEDGQELDSWYVILNGTVEISHPDGKVENLFMGNSFGITPTLDKQYMHGIVRTKVDDCQFVCIAQQDYWRILNHVEKNTHKVEEEGEIVMVHEHRELDRSGTRKGHIVIKATPERLIMHLIEEHSIVDPTYIEDFLLTYRTFLESPLDVGIKLLEWFKIDSLRDKVTRIVLLWVNNHFNDFEGDPAMTRFLEEFEKNLEDTKMNGHLRLLNIACAAKAKWRQVVLQKASRESPLQFSLNGGSEKGFGIFVEGVEPGSKAADSGLKRGDQIMEVNGQNFENITFMKAVEILRNNTHLALTVKTNIFVFKELLFRTEQEKSGVPHIPKIAEKKSNRHSIQHVPGDIEQTSQEKGSKKVKANTVSGGRNKIRKILDKTRFSILPPKLFSDGGLSQSQDDSIVGTRHCRHSLAIMPIPGTLSSSSPDLLQPTTSMLDFSNPSDIPDQVIRVFKVDQQSCYIIISKDTTAKEVVFHAVHEFGLTGASDTYSLCEVSVTPEGVIKQRRLPDQFSKLADRIQLNGRYYLKNNMETETLCSDEDAQELVKESQLSMLQLSTIEVATQLSMRDFDLFRNIEPTEYIDDLFKLNSKTGNTHLKRFEDIVNQETFWVASEILTEANQLKRMKIIKHFIKIALHCRECKNFNSMFAIISGLNLASVARLRGTWEKLPSKYEKHLQDLQDIFDPSRNMAKYRNILSSQSMQPPIIPLFPVVKKDMTFLHEGNDSKVDGLVNFEKLRMISKEIRQVVRMTSANMDPAMMFRQRSLSQGSTNSNMLDVQGGAHKKRARRSSLLNAKKLYEDAQMARKVKQYLSSLDVETDEEKFQMMSLQWEPAYGTLTKNLSEKRSAKSSEMSPVPMRSAGQTTKAHLHQPHRVSQVLQVPAVNLHPIRKKGQTKDPALM

SEQ ID NO: 19510 - protein, 1513 aa, Artificial Sequence
  Synthetic polypeptide
HFGRPSFGKQFGGKRGCDCLVLEPSEMIVVENAKDNEDSILQREIPARQSRRRFRKINYKGERQTITDDVEVNSYLSLPADLTKMHLTENPHPQVTHVSSSQSGCSIASDSGSSSLSDIYQATESEVGDVDLTRLPEGPVDSEDDEEEDEEIDRTDPLQGRDLVRECLEKEPADKTDDDIEQLLEFMHQLPAFANMTMSVRRELCSVMIFEVVEQAGAIILEDGQELDSWYVILNGTVEISHPDGKVENLFMGNSFGITPTLDKQYMHGIVRTKVDDCQFVCIAQQDYWRILNHVEKNTHKVEEEGEIVMVHEHRELDRSGTRKGHIVIKATPERLIMHLIEEHSIVDPTYIEDFLLTYRTFLESPLDVGIKLLEWFKIDSLRDKVTRIVLLWVNNHFNDFEGDPAMTRFLEEFEKNLEDTKMNGHLRLLNIACAAKAKWRQVVLQKASRESPLQFSLNGGSEKGFGIFVEGVEPGSKAADSGLKRGDQIMEVNGQNFENITFMKAVEILRNNTHLALTVKTNIFVFKELLFRTEQEKSGVPHIPKIAEKKSNRHSIQHVPGDIEQTSQEKGSKKVKANTVSGGRNKIRKILDKTRFSILPPKLFSDGGLSQSQDDSIVGTRHCRHSLAIMPIPGTLSSSSPDLLQPTTSMLDFSNPSDIPDQVIRVFKVDQQSCYIIISKDTTAKEVVFHAVHEFGLTGASDTYSLCEVSVTPEGVIKQRRLPDQFSKLADRIQLNGRYYLKNNMETETLCSDEDAQELVKESQLSMLQLSTIEVATQLSMRDFDLFRNIEPTEYIDDLFKLNSKTGNTHLKRFEDIVNQETFWVASEILTEANQLKRMKIIKHFIKIALHCRECKNFNSMFAIISGLNLASVARLRGTWEKLPSKYEKHLQDLQDIFDPSRNMAKYRNILSSQSMQPPIIPLFPVVKKDMTFLHEGNDSKVDGLVNFEKLRMISKEIRQVVRMTSANMDPAMMFRQRSLSQGSTNSNMLDVQGGAHKKRARRSSLLNAKKLYEDAQMARKVKQYLSSLDVETDEEKFQMMSLQWEPAYGTLTKNLSEKRSAKSSEMSPVPMRSAGQTTKAHLHQPHRVSQVLQVPAVNLHPIRKKGQTKDPALNTSLPQKVLGTTEEISGKKHTEDTISVASSLHSSPPASPQGSPHKGYTLIPSAKSDNLSDSSHSEISSRSSIVSNCSVDSMSAALQDERCSSQALAVPESTGALEKTEHASGIGDHSQHGPGWTLLKPSLIKCLAVSSSVSNEEISQEHIIIEAADSGRGSWTSCSSSSHDNFQSLPNPKSWDFLNSYRHTHLDDPIAEVEPTDSEPYSCSKSCSRTCGQCKGSLERKSWTSSSSLSDTYEPNYGTVKQRVLESTPAESSEGLDPKDATDPVYKTVTSSTEKGLIVYCVTSPKKDDRYREPPPTPPGYLGISLADLKEGPHTHLKPPDYSVAVQRSKMMHNSLSRLPPASLSSNLVACVPSKIVTQPQRHNLQPFHPKLGDVTDADSEADENEQVSAV

SEQ ID NO: 19511 - protein, 1303 aa, Artificial Sequence
  Synthetic polypeptide
HFGRPSFGKQFGGKRGCDCLVLEPSEMIVVENAKDNEDSILQREIPARQSRRRFRKINYKGERQTITDDVEVNSYLSLPADLTKMHLTENPHPQVTHVSSSQSGCSIASDSGSSSLSDIYQATESEVGDVDLTRLPEGPVDSEDDEEEDEEIDRTDPLQGRDLVRECLEKEPADKTDDDIEQLLEFMHQLPAFANMTMSVRRELCSVMIFEVVEQAGAIILEDGQELDSWYVILNGTVEISHPDGKVENLFMGNSFGITPTLDKQYMHGIVRTKVDDCQFVCIAQQDYWRILNHVEKNTHKVEEEGEIVMVHEHRELDRSGTRKGHIVIKATPERLIMHLIEEHSIVDPTYIEDFLLTYRTFLESPLDVGIKLLEWFKIDSLRDKVTRIVLLWVNNHFNDFEGDPAMTRFLEEFEKNLEDTKMNGHLRLLNIACAAKAKWRQVVLQKASRESPLQFSLNGGSEKGFGIFVEGVEPGSKAADSGLKRGDQIMEVNGQNFENITFMKAVEILRNNTHLALTVKTNIFVFKELLFRTEQEKSGVPHIPKIAEKKSNRHSIQHVPGDIEQTSQEKGSKKVKANTVSGGRNKIRKILDKTRFSILPPKLFSDGGLSQSQDDSIVGTRHCRHSLAIMPIPGTLSSSSPDLLQPTTSMLDFSNPSDIPDQVIRVFKVDQQSCYIIISKDTTAKEVVFHAVHEFGLTGASDTYSLCEVSVTPEGVIKQRRLPDQFSKLADRIQLNGRYYLKNNMETETLCSDEDAQELVKESQLSMLQLSTIEVATQLSMRDFDLFRNIEPTEYIDDLFKLNSKTGNTHLKRFEDIVNQETFWVASEILTEANQLKRMKIIKHFIKIALHCRECKNFNSMFAIISGLNLASVARLRGTWEKLPSKYEKHLQDLQDIFDPSRNMAKYRNILSSQSMQPPIIPLFPVVKKDMTFLHEGNDSKVDGLVNFEKLRMISKEIRQVVRMTSANMDPAMMFRQRSLSQGSTNSNMLDVQGGAHKKRARRSSLLNAKKLYEDAQMARKVKQYLSSLDVETDEEKFQMMSLQWEPAYGTLTKNLSEKRSAKSSEMSPVPMRSAGQTTKAHLHQPHRVSQVLQVPAVNLHPIRKKGQTKDPALNTSLPQKVLGTTEEISGKKHTEDTISVASSLHSSPPASPQGSPHKVGSIISDHSSKISGQSCPGIGGAYLQKKILQITRSTAKRTDSTEKATEENRDRTSCENTTRKRMTSPFRRLRERMLSRERLVNSQKEDTDHNQATESCEKVKDVGSNIKDEKGSAIFNSNSQGNSNTLNCFYTRFKSKRRKTL

SEQ ID NO: 19512 - protein, 32 aa, Artificial Sequence
  Synthetic polypeptide
PGAVAHACNPSTLGGQVLVSSLEEKEDVIVLY

SEQ ID NO: 19513 - protein, 430 aa, Artificial Sequence; identical to SEQ ID NO: 2177
  Synthetic polypeptide

SEQ ID NO: 19514 - protein, 4 aa, Artificial Sequence
  Synthetic polypeptide
PEHS

SEQ ID NO: 19515 - protein, 53 aa, Artificial Sequence; identical to SEQ ID NO: 5062
  Synthetic polypeptide

SEQ ID NO: 19516 - protein, 13 aa, Artificial Sequence
  Synthetic polypeptide
ANRKAGCAVTSLL

SEQ ID NO: 19517 - protein, 52 aa, Artificial Sequence
  Synthetic polypeptide
ANRKAGCAVTSLLASELTKDDAMAAVPAKVSKNSETFPTILEEAKELVGRAS

SEQ ID NO: 19518 - protein, 20 aa, Artificial Sequence
  Synthetic polypeptide
SQLLGRLSQQEGRVCSHISA

SEQ ID NO: 19519 - protein, 27 aa, Artificial Sequence
  Synthetic polypeptide
SQLLGRLSQQEGRVCSHISASFGADQG

SEQ ID NO: 19520 - protein, 43 aa, Artificial Sequence
  Synthetic polypeptide
TTWRDPISAKKYKNSQIWWHMLIVPATREAEPTGRPGVQSHLC

SEQ ID NO: 19521 - protein, 42 aa, Artificial Sequence
  Synthetic polypeptide
HGAEMCGSKPDVHAELGSAVCTQRVPDGWARGARGASAARAH

SEQ ID NO: 19522 - protein, 492 aa, Artificial Sequence
  Synthetic polypeptide
MVQKCAALNQMCTRNLALLFAPSVFQTDGRGEHEVRVLQELIDGYISVFDIDSDQVAQIDLEVSLITTWKDVQLSQAGDLIMEVYIEQQLPDNCVTLKVSPTLTAEELTNQVLEMRGTAAGMDLWVTFEIREHGELERPLHPKEKVLEQALQWCQLPEPCSASLLLKKVPLAQAGCLFTGIRRESPRVGLLRCREEPPRLLGSRFQERFFLLRGRCLLLLKEKKSSKPEREWPLEGAKVYLGIRKKLKPPTPWGFTLILEKMHLYLSCTDEDEMWDWTTSILKAQHDDQQPVVLRRHSSSDLARQKFGTMPLLPIRGDDSGATLLSANQTLPMKSSQGSVEEQEELEEPVYEEPVYEEVGAFPELIQDTSTSFSTTREWTVKPENPLTSQKSLDQPFLSKSSTLGQEERPPEPPPGPPSKSSPQARGSLEEQLLQELSSLILRKGETTAGLGSPSQPSSPQSPSPTGLPTQTPGFPTQPPCTSSPPSSQPLT

SEQ ID NO: 19523 - protein, 505 aa, Artificial Sequence
  Synthetic polypeptide
MVQKCAALNQMCTRNLALLFAPSVFQTDGRGEHEVRVLQELIDGYISVFDIDSDQVAQIDLEVSLITTWKDVQLSQAGDLIMEVYIEQQLPDNCVTLKVSPTLTAEELTNQVLEMRGTAAGMDLWVTFEIREHGELERPLHPKEKVLEQALQWCQLPEPCSASLLLKKVPLAQAGCLFTGIRRESPRVGLLRCREEPPRLLGSRFQERFFLLRGRCLLLLKEKKSSKPEREWPLEGAKVYLGIRKKLKPPTPWGFTLILEKMHLYLSCTDEDEMWDWTTSILKAQHDDQQPVVLRRHSSSDLARQKFGTMPLLPIRGDDSGATLLSANQTLRRLHNRRTLSMFFPMKSSQGSVEEQEELEEPVYEEPVYEEVGAFPELIQDTSTSFSTTREWTVKPENPLTSQKSLDQPFLSKSSTLGQEERPPEPPPGPPSKSSPQARGSLEEQLLQELSSLILRKGETTAGLGSPSQPSSPQSPSPTGLPTQTPGFPTQPPCTSSPPSSQPLT

SEQ ID NO: 19524 - protein, 7 aa, Artificial Sequence
  Synthetic polypeptide
WCRNVRL

SEQ ID NO: 19525 - protein, 694 aa, Artificial Sequence
  Synthetic polypeptide
AQNLRWFSPLSCHQLLGPGLLRLGRLWLRSPSHTAPAPGLWLSGFGLLRGDHLFLCSAPGPGPPAPEDMVHLRRLQEISVVSAADTPDKKEHLVLVETGRTLYLQGEGRLDFTAWNAAIGGAAGGGGTGLQEQQMSRGDIPIIVDACISFVTQHELPQKNQRLEKYKDVIGCLPRVNRRTLATLIGHLYRVQKCAALNQMCTRNLALLFAPSVFQTDGRGEHEVRVLQELIDGYISVFDIDSDQVAQIDLEVSLITTWKDVQLSQAGDLIMEVYIEQQLPDNCVTLKVSPTLTAEELTNQVLEMRGTAAGMDLWVTFEIREHGELERPLHPKEKVLEQALQWCQLPEPCSASLLLKKVPLAQAGCLFTGIRRESPRVGLLRCREEPPRLLGSRFQERFFLLRGRCLLLLKEKKSSKPEREWPLEGAKVYLGIRKKLKPPTPWGFTLILEKMHLYLSCTDEDEMWDWTTSILKAQHDDQQPVVLRRHSSSDLARQKFGTMPLLPIRGDDSGATLLSANQTLRRLHNRRTLSMFFPMKSSQGSVEEQEELEEPVYEEPVYEEVGAFPELIQDTSTSFSTTREWTVKPENPLTSQKSLDQPFLSKSSTLGQEERPPEPPPGPPSKSSPQARGSLEEQLLQELSSLILRKGETTAGLGSPSQPSSPQSPSPTGLPTQTPGFPTQPPCTSSPPSSQPLT

SEQ ID NO: 19526 - protein, 752 aa, Artificial Sequence
  Synthetic polypeptide
AQNLRWFSPLSCHQLLGPGLLRLGRLWLRSPSHTAPAPGLWLSGFGLLRGDHLFLCSAPGPGPPAPEDMVHLRRLQEISVVSAADTPDKKEHLVLVETGRTLYLQGEGRLDFTAWNAAIGGAAGGGGTGLQEQQMSRGDIPIIVDACISFVTQHGLRLEGVYRKGGARARSLRLLAEFRRDARSVKLRPGEHFVEDVTDTLKRFFRELDDPVTSARLLPRWREAAELPQKNQRLEKYKDVIGCLPRVNRRTLATLIGHLYRVQKCAALNQMCTRNLALLFAPSVFQTDGRGEHEVRVLQELIDGYISVFDIDSDQVAQIDLEVSLITTWKDVQLSQAGDLIMEVYIEQQLPDNCVTLKVSPTLTAEELTNQVLEMRGTAAGMDLWVTFEIREHGELERPLHPKEKVLEQALQWCQLPEPCSASLLLKKVPLAQAGCLFTGIRRESPRVGLLRCREEPPRLLGSRFQERFFLLRGRCLLLLKEKKSSKPEREWPLEGAKVYLGIRKKLKPPTPWGFTLILEKMHLYLSCTDEDEMWDWTTSILKAQHDDQQPVVLRRHSSSDLARQKFGTMPLLPIRGDDSGATLLSANQTLPMKSSQGSVEEQEELEEPVYEEPVYEEVGAFPELIQDTSTSFSTTREWTVKPENPLTSQKSLDQPFLSKSSTLGQEERPPEPPPGPPSKSSPQARGSLEEQLLQELSSLILRKGETTAGLGSPSQPSSPQSPSPTGLPTQTPGFPTQPPCTSSPPSSQPLT

SEQ ID NO: 19527 - protein, 765 aa, Artificial Sequence
  Synthetic polypeptide
AQNLRWFSPLSCHQLLGPGLLRLGRLWLRSPSHTAPAPGLWLSGFGLLRGDHLFLCSAPGPGPPAPEDMVHLRRLQEISVVSAADTPDKKEHLVLVETGRTLYLQGEGRLDFTAWNAAIGGAAGGGGTGLQEQQMSRGDIPIIVDACISFVTQHGLRLEGVYRKGGARARSLRLLAEFRRDARSVKLRPGEHFVEDVTDTLKRFFRELDDPVTSARLLPRWREAAELPQKNQRLEKYKDVIGCLPRVNRRTLATLIGHLYRVQKCAALNQMCTRNLALLFAPSVFQTDGRGEHEVRVLQELIDGYISVFDIDSDQVAQIDLEVSLITTWKDVQLSQAGDLIMEVYIEQQLPDNCVTLKVSPTLTAEELTNQVLEMRGTAAGMDLWVTFEIREHGELERPLHPKEKVLEQALQWCQLPEPCSASLLLKKVPLAQAGCLFTGIRRESPRVGLLRCREEPPRLLGSRFQERFFLLRGRCLLLLKEKKSSKPEREWPLEGAKVYLGIRKKLKPPTPWGFTLILEKMHLYLSCTDEDEMWDWTTSILKAQHDDQQPVVLRRHSSSDLARQKFGTMPLLPIRGDDSGATLLSANQTLRRLHNRRTLSMFFPMKSSQGSVEEQEELEEPVYEEPVYEEVGAFPELIQDTSTSFSTTREWTVKPENPLTSQKSLDQPFLSKSSTLGQEERPPEPPPGPPSKSSPQARGSLEEQLLQELSSLILRKGETTAGLGSPSQPSSPQSPSPTGLPTQTPGFPTQPPCTSSPPSSQPLT

SEQ ID NO: 19528 - protein, 5 aa, Artificial Sequence
  Synthetic polypeptide
DGSPR

SEQ ID NO: 19529 - protein, 76 aa, Artificial Sequence
  Synthetic polypeptide
VLPGGCCEDCHTILAPGLCVMVHDRISTELEMVLPAELPPAAGPRAAAAGPPMAAVPLPYSPGPWSLAVRVWPPSW

SEQ ID NO: 19530 - protein, 29 aa, Artificial Sequence
  Synthetic polypeptide
GLPSHVELDMKPDNILLDEHDTWLSYKSH

SEQ ID NO: 19531 - protein, 259 aa, Artificial Sequence
  Synthetic polypeptide
GLPSHVELDMKPDNILLDEHGHVHITDFNIAAMLPRETQITTMAGTKPYMAPEMFSSRKGAGYSFAVDWWSLGVTAYELLRGRRPYHIRSSTSSKEIVHTFETTVVTYPSAWSQEMVSLLKKLLEPNPDQRFSQLSDVQNFPYMNDINWDAVFQKRLIPGFIPNKGRLNCDPTFELEEMILESKPLHKKKKRLAKKEKDMRKCDSSQTCLLQEHLDSVQKEFIIFNREKVNRDFNKRQPNLALEQTKDPQGEDGQNNNL

SEQ ID NO: 19532 - protein, 270 aa, Artificial Sequence
  Synthetic polypeptide
GLPSHVELDMKPDNILLDEHGHVHITDFNIAAMLPRETQITTMAGTKPYMAPEMFSSRKGAGYSFAVDWWSLGVTAYELLRGRRPYHIRSSTSSKEIVHTFETTVVTYPSAWSQEMVSLLKKLLEPNPDQRFSQLSDVQNFPYMNDINWDAVFQKRLIPGFIPNKGRLNCDPTFELEEMILESKPLHKKKKRLAKKEKDMRKCDSSQTCLLQEHLDSVQKEFIIFNREKVNRDFNKRQPNLALEQTKDPQVTNGQMDTGLSETFQTSKVS

SEQ ID NO: 19533 - protein, 29 aa, Artificial Sequence
  Synthetic polypeptide
GLPSHVELDMKPDNILLDEHVQQYTLKSH

SEQ ID NO: 19534 - protein, 38 aa, Artificial Sequence
  Synthetic polypeptide
RAIPLHMVSCLPPRKRCLCFSITFCHDCEGSPAMWNWI

SEQ ID NO: 19535 - protein, 44 aa, Artificial Sequence
  Synthetic polypeptide
WFYKGQFPCTWSLACLHVRGAFASPSPSAMIVRAPQPCGTGYEA

SEQ ID NO: 19536 - protein, 4 aa, Artificial Sequence
  Synthetic polypeptide
DNAG

SEQ ID NO: 19537 - protein, 25 aa, Artificial Sequence
  Synthetic polypeptide
RRMSISVTLWTSSQSTRPRTSWLPP

SEQ ID NO: 19538 - protein, 730 aa, Artificial Sequence
  Synthetic polypeptide
VTDPPSVRWATDGTYLIAYCEDKSKITQDEHFCDFVDILTEYKTKNILASPIMNGKDVVAIIMAVNKVDGSHFTKRDEEILLKYLNFANLIMKVYHLSYLHNCETRRGQILLWSGSKVFEELTDIERQFHKALYTVRAFLNCDRYSVGLLDMTKQKEFFDVWPVLMGEVPPYSGPRTPDGREINFYKVIDYILHGKEDIKVIPNPPPDHWALVSGLPAYVAQNGLICNIMNAPAEDFFAFQKEPLDESGWMIKNVLSMPIVNKKEEIVGVATFYNRKDGKPFDEMDETLMESLTQFLGWSVLNPDTYESMNKLENRKDIFQDIVKYHVKCDNEEIQKILKTREVYGKEPWECEEEELAEILQAELPDADKYEINKFHFSDLPLTELELVKCGIQMYYELKVVDKFHIPQEALVRFMYSLSKGYRKITYHNWRHGFNVGQTMFSLLVTGKLKRYFTDLEALAMVTAAFCHDIDHRGTNNLYQMKSQNPLAKLHGSSILERHHLEFGKTLLRDESLNIFQNLNRRQHEHAIHMMDIAIIATDLALYFKKRTMFQKIVDQSKTYESEQEWTQYMMLEQTRKEIVMAMMMTACDLSAITKPWEVQSQVALLVAAEFWEQGDLERTVLQQNPIPMMDRNKADELPKLQVGFIDFVCTFVYKEFSRFHEEITPMLDGITNNRKEWKALADEYDAKMKVQEEKKQKQQSAKSAAAGNQPGGNPSPGGATTSKSCCIQ

SEQ ID NO: 19539 - protein, 975 aa, Artificial Sequence
  Synthetic polypeptide
FCSSFAFHYDSEASSAMLNCQGIPVIEPSVPELVVKPGATVTLRCVGNGSVEWDGPPSPHWTLYSDGSSSILSTNNATFQNTGTYRCTEPGDPLGGSAAIHLYVKDPARPWNVLAQEVVVFEDQDALLPCLLTDPVLEAGVSLVRVRGRPLMRHTNYSFSPWHGFTIHRAKFIQSQDYQCSALMGGRKVMSISIRLKVQKVIPGPPALTLVPAELVRIRGEAAQIVCSASSVDVNFDVFLQHNNTKLAIPQQSDFHNNRYQKVLTLNLDQVDFQHAGNYSCVASNVQGKHSTSMFFRVVESAYLNLSSEQNLIQEVTVGEGLNLKVMVEAYPGLQGFNWTYLGPFSDHQPEPKLANATTKDTYRHTFTLSLPRLKPSEAGRYSFLARNPGGWRALTFELTLRYPPEVSVIWTFINGSGTLLCAASGYPQPNVTWLQCSGHTDRCDEAQVLQVWDDPYPEVLSQEPFHKVTVQSLLTVETLEHNQTYECRAHNSVGSGSWAFIPISAGAHTHPPDEFLFTPVVVACMSIMALLLLLLLLLLYKYKQKPKYQVRWKIIESYEGNSYTFIDPTQLPYNEKWEFPRNNLQFGKTLGAGAFGKVVEATAFGLGKEDAVLKVAVKMLKSTAHADEKEALMSELKIMSHLGQHENIVNLLGACTHGGPVLVITEYCCYGDLLNFLRRKAEAMLGPSLSPGQDPEGGVDYKNIHLEKKYVRRDSGFSSQGVDTYVEMRPVSTSSNDSFSEQDLDKEDGRPLELRDLLHFSSQVAQGMAFLASKNCIHRDVAARNVLLTNGHVAKIGDFGLARDIMNDSNYIVKGNARLPVKWMAPESIFDCVYTVQSDVWSYGILLWEIFSLGLNPYPGILVNSKFYKLVKDGYQMAQPAFAPKNIYSIMQACWALEPTHRPTFQQICSFLQEQAQEDRRERDYTNLPSSSRSGGSGSSSSELEEESSSEHLTCCEQGDIAQPLLQPNNYQFC

SEQ ID NO: 19540 - protein, 674 aa, Artificial Sequence
  Synthetic polypeptide
FCSSFAFHYDSEASSAMLNCQGIPVIEPSVPELVVKPGATVTLRCVGNGSVEWDGPPSPHWTLYSDGSSSILSTNNATFQNTGTYRCTEPGDPLGGSAAIHLYVKDPARPWNVLAQEVVVFEDQDALLPCLLTDPVLEAGVSLVRVRGRPLMRHTNYSFSPWHGFTIHRAKFIQSQDYQCSALMGGRKVMSISIRLKVQKVIPGPPALTLVPAELVRIRGEAAQIVCSASSVDVNFDVFLQHNNTKLAIPQQSDFHNNRYQKVLTLNLDQVDFQHAGNYSCVASNVQGKHSTSMFFRVVESAYLNLSSEQNLIQEVTVGEGLNLKVMVEAYPGLQGFNWTYLGPFSDHQPEPKLANATTKDTYRHTFTLSLPRLKPSEAGRYSFLARNPGGWRALTFELTLRYPPEVSVIWTFINGSGTLLCAASGYPQPNVTWLQCSGHTDRCDEAQVLQVWDDPYPEVLSQEPFHKVTVQSLLTVETLEHNQTYECRAHNSVGSGSWAFIPISAGAHTHPPDEFLFTPVVVACMSIMALLLLLLLLLLYKYKQKPKYQVRWKIIESYEGNSYTFIDPTQLPYNEKWEFPRNNLQFGKTLGAGAFGKVVEATAFGLGKEDAVLKVAVKMLKSTAHADEKEALMSELKIMSHLGQHENIVNLLGACTHGGTVASPARVWTPMWR

SEQ ID NO: 19541 - protein, 309 aa, Artificial Sequence
  Synthetic polypeptide
FCSSFAFHYDSEASSAMLNCQGIPVIEPSVPELVVKPGATVTLRCVGNGSVEWDGPPSPHWTLYSDGSSSILSTNNATFQNTGTYRCTEPGDPLGGSAAIHLYVKDPARPWNVLAQEVVVFEDQDALLPCLLTDPVLEAGVSLVRVRGRPLMRHTNYSFSPWHGFTIHRAKFIQSQDYQCSALMGGRKVMSISIRLKVQKVIPGPPALTLVPAELVRIRGEAAQIVCSASSVDVNFDVFLQHNNTKLAIPQQSDFHNNRYQKVLTLNLDQVDFQHAGNYSCVASNVQGKHSTSMFFRVVGTPSPSLCPA

SEQ ID NO: 19542 - protein, 19 aa, Artificial Sequence
  Synthetic polypeptide
GLLSHAELSGNPSDRAQCP

SEQ ID NO: 19543 - protein, 6 aa, Artificial Sequence
  Synthetic polypeptide
TVRESQ

SEQ ID NO: 19544 - protein, 2753 aa, Artificial Sequence
  Synthetic polypeptide
WNSEGFFNINALLGIITLAQKLDQANHAPHTLTVKAEDQGSPQWHDLATVIIHVYPSDRSAPIFSKSEYFVEIPESIPVGSPILLVSAMSPSEVTYELREGNKDGVFSMNSYSGLISTQKKLDHEKISSYQLKIRGSNMAGAFTDVMVVVDIIDENDNAPMFLKSTFVGQISEAAPLYSMIMDKNNNPFVIHASDSDKEANSLLVYKILEPEALKFFKIDPSMGTLTIVSEMDYESMPSFQFCVYVHDQGSPVLFAPRPAQVIIHVRDVNDSPPRFSEQIYEVAIVGPIHPGMELLMVRASDEDSEVNYSIKTGNADEAVTIHPVTGSISVLNPAFLGLSRKLTIRASDGLYQDTALVKISLTQVLDKSLQFDQDVYWAAVKENLQDRKALVILGAQGNHLNDTLSYFLLNGTDMFHMVQSAGVLQTRGVAFDREQQDTHELAVEVRDNRTPQRVAQGLVRVSIEDVNDNPPKFKHLPYYTIIQDGTEPGDVLFQVSATDEDLGTNGAVTYEFAEDYTYFRIDPYLGDISLKKPFDYQALNKYHLKVIARDGGTPSLQSEEEVLVTVRNKSNPLFQSPYYKVRVPENITLYTPILHTQARSPEGLRLIYNIVEEEPLMLFTTDFKTGVLTVTGPLDYESKTKHVFTVRATDTALGSFSEATVEVLVEDVNDNPPTFSQLVYTTSISEGLPAQTPVIQLLASDQDSGRNRDVSYQIVEDGSDVSKFFQINGSTGEMSTVQELDYEAQQHFHVKVRAMDKGDPPLTGETLVVVNVSDINDNPPEFRQPQYEANVSELATCGHLVLKVQAIDPDSRDTSRLEYLILSGNQDRHFFINSSSGIISMFNLCKKHLDSSYNLRVGASDGVFRATVPVYINTTNANKYSPEFQQHLYEAELAENAMVGTKVIDLLAIDKDSGPYGTIDYTIINKLASEKFSINPNGQIATLQKLDRENSTERVIAIKVMARDGGGRVAFCTVKIILTDENDNPPQFKASEYTVSIQSNVSKDSPVIQVLAYDADEGQNADVTYSVNPEDLVKDVIEINPVTGVVKVKDSLVGLENQTLDFFIKAQDGGPPHWNSLVPVRLQVVPKKVSLPKFSEPLYTFSAPEDLPEGSEIGIVKAVAAQDPVIYSLVRGTTPESNKDGVFSLDPDTGVIKVRKPMDHESTKLYQIDVMAHCLQNTDVVSLVSVNIQVGDVNDNRPVFEADPYKAVLTENMPVGTSVIQVTAIDKDTGRDGQVSYRLSADPGSNVHELFAIDSESGWITTLQELDCETCQTYHFHVVAYDHGQTIQLSSQALVQVSITDENDNAPRFASEEYRGSVVENSEPGELVATLKTLDADISEQNRQVTCYITEGDPLGQFGISQVGDEWRISSRKTLDREHTAKYLLRVTASDGKFQASVTVEIFVLDVNDNSPQCSQLLYTGKVHEDVFPGHFILKVSATDLDTDTNAQITYSLHGPGAHEFKLDPHTGELTTLTALDRERKDVFNLVAKATDGGGRSCQADITLHVEDVNDNAPRFFPSHCAVAVFDNTTVKTPVAVVFARDPDQGANAQVVYSLPDSAEGHFSIDATTGVIRLEKPLQVRPQAPLELTVRASDLGTPIPLSTLGTVTVSVVGLEDYLPVFLNTEHSVQVPEDAPPGTEVLQLATLTRPGAEKTGYRVVSGNEQGRFRLDARTGILYVNASLDFETSPKYFLSIECSRKSSSSLSDVTTVMVNITDVNEHRPQFPQDPYSTRVLENALVGDVILTVSATDEDGPLNSDITYSLIGGNQLGHFTIHPKKGELQVAKALDREQASSYSLKLRATDSGQPPLHEDTDIAIQVADVNDNPPRFFQLNYSTTVQENSPIGSKVLQLILSDPDSPENGPPYSFRITKGNNGSAFRVTPDGWLVTAEGLSRRAQEWYQLQIQASDSGIPPLSSLTSVRVHVTEQSHYAPSALPLEIFITVGEDEFQGGMVGKIHATDRDPQDTLTYSLAEEETLGRHFSVGAPDGKIIAAQGLPRGHYSFNVTVSDGTFTTTAGVHVYVWHVGQEALQQAMWMGFYQLTPEELVSDHWRNLQRFLSHKLDIKRANIHLASLQPAEAVAGVDVLLVFEGHSGTFYEFQELASIITHSAKEMEHSVGVQMRSAMPMVPCQGPTCQGQICHNTVHLDPKVGPTYSTARLSILTPRHHLQRSCSCNGTATRFSGQSYVRYRAPAARNWHIHFYLKTLQPQAILLFTNETASVSLKLASGVPQLEYHCLGGFYGNLSSQRHVNDHEWHSILVEEMDASIRLMVDSMGNTSLVVPENCRGLRPERHLLLGGLILLHSSSNVSQGFEGCLDAVVVNEEALDLLAPGKTVAGLLETQALTQCCLHSDYCSQNTCLNGGKCSWTHGAGYVCKCPPQFSGKHCEQGRENCTFAPCLEGGTCILSPKGASCNCPHPYTGDRCEMEARGCSEGHCLVTPEIQRGDWGQQELLIITVAVAFIIISTVGLLFYCRRCKSHKPVAMEDPDLLARSVGVDTQAMPAIELNPLSASSCNNLNQPEPSKASVPNELVTFGPNSKQRPVVCSVPPRLPPAAVPSHSDNEPVIKRTWSSEEMVYPGGAMVWPPTYSRNERWEYPHSEVTQGPLPPSAHRHSTPVVMPEPNGLYGGFPFPLEMENKRAPLPPRYSNQNLEDLMPSRPPSPRERLVAPCLNEYTAISYYHSQFRQGGGGPCLADGGYKGVGMRLSRAGPSYAVCEVEGAPLAGQGQPRVPPNYEGSDMVESDYGSCEEVMF

SEQ ID NO: 19545 - protein, 121 aa, Artificial Sequence; identical to SEQ ID NO: 3361
  Synthetic polypeptide

SEQ ID NO: 19546 - protein, 40 aa, Artificial Sequence; identical to SEQ ID NO: 5791
  Synthetic polypeptide

SEQ ID NO: 19547 - protein, 15 aa, Artificial Sequence
  Synthetic polypeptide
WCLLLPELSCQPHYL

SEQ ID NO: 19548 - protein, 85 aa, Artificial Sequence
  Synthetic polypeptide
GQARWLTPVIPALWEAEAGGSRDASGAVHSPPEHHAWLCGATGIQGGDLWLAETMPVFLCPAPHDFNTGELGHDHLDSQSHELHN

SEQ ID NO: 19549 - protein, 63 aa, Artificial Sequence
  Synthetic polypeptide
PGTVAHACNPSTLGGRGRWITRCLRSSTLTTGAPCLALWGHRYTRWGFMAGGNDACISLSCSS

SEQ ID NO: 19550 - protein, 302 aa, Artificial Sequence
  Synthetic polypeptide
SQHFGRPRQVDHEMPQEQYTHHRSTMPGSVGPQVYKVGIYGWRKRCLYFFVLLLMILILVNLAMTIWILKVMNFTIDGMGNLRITEKGLKLEGDSEFLQPLYAKEIQSRPGNALYFKSARNVTVNILNDQTKVLTQLITGPKAVEAYGKKFEVKTVSGKLLFSADNNEVVVGAERLRVLGAEGTVFPKSIETPNVRADPFKELRLESPTRSLVMEAPKGVEINAEAGNMEATCRTELRLESKDGEIKLDAAKIRLPRLPHGSYTPTGTRQKVFEICVCANGRLFLSQAGAGSTCQINTSVCL

SEQ ID NO: 19551 - protein, 268 aa, Artificial Sequence
  Synthetic polypeptide
SQHFGRPRQVDHEMPQEQYTHHRSTMPGSVGPQVYKVGIYGWRKRCLYFFVLLLMILILVNLAMTIWILKVMNFTIDGMGNLRITEKGLKLEGDSEFLQPLYAKEIQSRPGNALYFKSARNVTVNILNDQTKVLTQLITGPKAVEAYGKKFEVKTVSGKLLFSADNNEVVVGAERLRVLGAEGTVFPKSIETPNVRADPFKELRLESPTRSLVMEAPKGVEINAEAGNMEATCRTELRLESKDGEVRDEKDRSSKSYSFNRPTLPITG

SEQ ID NO: 19552 - protein, 94 aa, Artificial Sequence
  Synthetic polypeptide
SQHFGRPRQVDHEMPQEQYTHHRSTMPGSVGPQVYKVGIYGWRKRCLYFFVLLLMILILVNLAMTIWILKVMNFTISIHLLLRFNWLFRCCGMS

SEQ ID NO: 19553 - protein, 264 aa, Artificial Sequence
  Synthetic polypeptide
LPKRKKSLCQKETCICIFFLQHISQLQRYGTNLSPHEQDGMGNLRITEKGLKLEGDSEFLQPLYAKEIQSRPGNALYFKSARNVTVNILNDQTKVLTQLITGPKAVEAYGKKFEVKTVSGKLLFSADNNEVVVGAERLRVLGAEGTVFPKSIETPNVRADPFKELRLESPTRSLVMEAPKGVEINAEAGNMEATCRTELRLESKDGEIKLDAAKIRLPRLPHGSYTPTGTRQKVFEICVCANGRLFLSQAGAGSTCQINTSVCL

SEQ ID NO: 19554 - protein, 230 aa, Artificial Sequence
  Synthetic polypeptide
LPKRKKSLCQKETCICIFFLQHISQLQRYGTNLSPHEQDGMGNLRITEKGLKLEGDSEFLQPLYAKEIQSRPGNALYFKSARNVTVNILNDQTKVLTQLITGPKAVEAYGKKFEVKTVSGKLLFSADNNEVVVGAERLRVLGAEGTVFPKSIETPNVRADPFKELRLESPTRSLVMEAPKGVEINAEAGNMEATCRTELRLESKDGEVRDEKDRSSKSYSFNRPTLPITG

SEQ ID NO: 19555 - protein, 20 aa, Artificial Sequence
  Synthetic polypeptide
TGWNGKPEDHRKRSKARRRL

SEQ ID NO: 19556 - protein, 10 aa, Artificial Sequence
  Synthetic polypeptide
VPMNRMEWET

SEQ ID NO: 19557 - protein, 21 aa, Artificial Sequence
  Synthetic polypeptide
ASLARNLMMTMKIMLLTKHGS

SEQ ID NO: 19558 - protein, 113 aa, Artificial Sequence
  Synthetic polypeptide
DVTCSSLPSAMTVRPPQPCGTALPLQDLLGEHTLVQQLFPGIPFDLRNGLHAPAPPAAQEYFLQEGFQAEEALQILQLEMCCPLRHCRGPPLGYFAGVFHSALVVEKQQHRQW

SEQ ID NO: 19559 - protein, 119 aa, Artificial Sequence
  Synthetic polypeptide
DVTCSSLPSAMTVRPPQPCGTALPLQDLLGEHTLVQQLFPGIPFDLRNGLHAPAPPAAQEYFLQEGFQAEEALQILQLEMCCPLRHCRGPPLGYFAGVFHSNASARTQLATPACRWAHL

SEQ ID NO: 19560 - protein, 2457 aa, Artificial Sequence
  Synthetic polypeptide
GLLSHVELHFLFKTSSGSTPLFSSSSPGYPLTSGTVYTPPPRLLPRNTFSRKAFKLKKPSKYCSWKCAALSAIAAALLLAILLAYFIAMHLLGLNWQLQPADGHTFNNGIRTGLPGNDDVATMPSGGKVPWSLKNSSIDSGEAEVGRRVTQEVPPGVFWRSQIHISQPQFLKFNISLGKDALFGVYIRRGLPPSHAQYDFMERLDGKEKWSVVESPRERRSIQTLVQNEAVFVQYLDVGLWHLAFYNDGKDKEMVSFNTVVLDSVQDCPRNCHGNGECVSGVCHCFPGFLGADCAKAACPVLCSGNGQYSKGTCQCYSGWKGAECDVPMNQCIDPSCGGHGSCIDGNCVCSAGYKGEHCEEVDCLDPTCSSHGVCVNGECLCSPGWGGLNCELARVQCPDQCSGHGTYLPDTGLCSCDPNWMGPDCSVEVCSVDCGTHGVCIGGACRCEEGWTGAACDQRVCHPRCIEHGTCKDGKCECREGWNGEHCTIDGCPDLCNGNGRCTLGQNSWQCVCQTGWRGPGCNVAMETSCADNKDNEGDGLVDCLDPDCCLQSACQNSLLCRGSRDPLDIIQQGQTDWPAVKSFYDRIKLLAGKDSTHIIPGENPFNSSLVSLIRGQVVTTDGTPLVGVNVSFVKYPKYGYTITRQDGTFDLIANGGASLTLHFERAPFMSQERTVWLPWNSFYAMDTLVMKTEENSIPSCDLSGFVRPDPIIISSPLSTFFSAAPGQNPIVPETQVLHEEIELPGSNVKLRYLSSRTAGYKSLLKITMTQSTVPLNLIRVHLMVAVEGHLFQKSFQASPNLAYTFIWDKTDAYGQRVYGLSDAVVSVGFEYETCPSLILWEKRTALLQGFELDPSNLGGWSLDKHHILNVKSGILHKGTGENQFLTQQPAIITSIMGNGRRRSISCPSCNGLAEGNKLLAPVALAVGIDGSLYVGDFNYIRRIFPSRNVTSILELRNKEFKHSNNPAHKYYLAVDPVSGSLYVSDTNSRRIYRVKSLSGTKDLAGNSEVVAGTGEQCLPFDEARCGDGGKAIDATLMSPRGIAVDKNGLMYFVDATMIRKVDQNGIISTLLGSNDLTAVRPLSCDSSMDVAQVRLEWPTDLAVNPMDNSLYVLENNVILRITENHQVSIIAGRPMHCQVPGIDYSLSKLAIHSALESASAIAISHTGVLYITETDEKKINRLRQVTTNGEICLLAGAASDCDCKNDVNCNCYSGDDAYATDAILNSPSSLAVAPDGTIYIADLGNIRIRAVSKNKPVLNAFNQYEAASPGEQELYVFNADGIHQYTVSLVTGEYLYNFTYSTDNDVTELIDNNGNSLKIRRDSSGMPRHLLMPDNQIITLTVGTNGGLKVVSTQNLELGLMTYDGNTGLLATKSDETGWTTFYDYDHEGRLTNVTRPTGVVTSLHREMEKSITIDIENSNRDDDVTVITNLSSVEASYTVVQDQVRNSYQLCNNGTLRVMYANGMGISFHSEPHVLAGTITPTIGRCNISLPMENGLNSIEWRLRKEQIKGKVTIFGRKLRVHGRNLLSIDYDRNIRTEKIYDDHRKFTLRIIYDQVGRPFLWLPSSGLAAVNVSYFFNGRLAGLQRGAMSERTDIDKQGRIVSRMFADGKVWSYSYLDKSMVLLLQSQRQYIFEYDSSDRLLAVTMPSVARHSMSTHTSIGYIRNIYNPPESNASVIFDYSDDGRILKTSFLGTGRQVFYKYGKLSKLSEIVYDSTAVTFGYDETTGVLKMVNLQSGGFSCTIRYRKIGPLVDKQIYRFSEEGMVNARFDYTYHDNSFRIASIKPVISETPLPVDLYRYDEISGKVEHFGKFGVIYYDINQIITTAVMTLSKHFDTHGRIKEVQYEMFRSLMYWMTVQYDSMGRVIKRELKLGPYANTTKYTYDYDGDGQLQSVAVNDRPTWRYSYDLNGNLHLLNPGNSVRLMPLRYDLRDRITRLGDVQYKIDDDGYLCQRGSDIFEYNSKGLLTRAYNKASGWSVQYRYDGVGRRASYKTNLGHHLQYFYSDLHNPTRITHVYNHSNSEITSLYYDLQGHLFAMESSSGEEYYVASDNTGTPLAVFSINGLMIKQLQYTAYGEIYYDSNPDFQMVIGFHGGLYDPLTKLVHFTQRDYDVLAGRWTSPDYTMWKNVGKEPAPFNLYMFKSNNPLSSELDLKNYVTDVKSWLVMFGFQLSNIIPGFPRAKMYFVPPPYELSESQASENGQLITGVQQTTERHNQAFMALEGQVITKKLHASIREKAGHWFATTTPIIGKGIMFAIKEGRVTTGVSSIASEDSRKVASVLNNAYYLDKMHYSIEGKDTHYFVKIGSADGDLVTLGTTIGRKVLESGVNVTVSQPTLLVNGRTRRFTNIEFQYSTLLLSIRYGLTPDTLDEEKARVLDQARQRALGTAWAKEQQKARDGREGSRLWTEGEKQQLLSTGRVQGYEGYYVLPVEQYPELADSSSNIQFLRQNEMGKR

SEQ ID NO: 19561 - protein, 2466 aa, Artificial Sequence
  Synthetic polypeptide
GLLSHVELHFLFKTSSGSTPLFSSSSPGYPLTSGTVYTPPPRLLPRNTFSRKAFKLKKPSKYCSWKCAALSAIAAALLLAILLAYFIAMHLLGLNWQLQPADGHTFNNGIRTGLPGNDDVATMPSGGKVPWSLKNSSIDSGEAEVGRRVTQEVPPGVFWRSQIHISQPQFLKFNISLGKDALFGVYIRRGLPPSHAQYDFMERLDGKEKWSVVESPRERRSIQTLVQNEAVFVQYLDVGLWHLAFYNDGKDKEMVSFNTVVLDSVQDCPRNCHGNGECVSGVCHCFPGFLGADCAKAACPVLCSGNGQYSKGTCQCYSGWKGAECDVPMNQCIDPSCGGHGSCIDGNCVCSAGYKGEHCEEVDCLDPTCSSHGVCVNGECLCSPGWGGLNCELARVQCPDQCSGHGTYLPDTGLCSCDPNWMGPDCSVEVCSVDCGTHGVCIGGACRCEEGWTGAACDQRVCHPRCIEHGTCKDGKCECREGWNGEHCTIGRQTAGTETDGCPDLCNGNGRCTLGQNSWQCVCQTGWRGPGCNVAMETSCADNKDNEGDGLVDCLDPDCCLQSACQNSLLCRGSRDPLDIIQQGQTDWPAVKSFYDRIKLLAGKDSTHIIPGENPFNSSLVSLIRGQVVTTDGTPLVGVNVSFVKYPKYGYTITRQDGTFDLIANGGASLTLHFERAPFMSQERTVWLPWNSFYAMDTLVMKTEENSIPSCDLSGFVRPDPIIISSPLSTFFSAAPGQNPIVPETQVLHEEIELPGSNVKLRYLSSRTAGYKSLLKITMTQSTVPLNLIRVHLMVAVEGHLFQKSFQASPNLAYTFIWDKTDAYGQRVYGLSDAVVSVGFEYETCPSLILWEKRTALLQGFELDPSNLGGWSLDKHHILNVKSGILHKGTGENQFLTQQPAIITSIMGNGRRRSISCPSCNGLAEGNKLLAPVALAVGIDGSLYVGDFNYIRRIFPSRNVTSILELRNKEFKHSNNPAHKYYLAVDPVSGSLYVSDTNSRRIYRVKSLSGTKDLAGNSEVVAGTGEQCLPFDEARCGDGGKAIDATLMSPRGIAVDKNGLMYFVDATMIRKVDQNGIISTLLGSNDLTAVRPLSCDSSMDVAQVRLEWPTDLAVNPMDNSLYVLENNVILRITENHQVSIIAGRPMHCQVPGIDYSLSKLAIHSALESASAIAISHTGVLYITETDEKKINRLRQVTTNGEICLLAGAASDCDCKNDVNCNCYSGDDAYATDAILNSPSSLAVAPDGTIYIADLGNIRIRAVSKNKPVLNAFNQYEAASPGEQELYVFNADGIHQYTVSLVTGEYLYNFTYSTDNDVTELIDNNGNSLKIRRDSSGMPRHLLMPDNQIITLTVGTNGGLKVVSTQNLELGLMTYDGNTGLLATKSDETGWTTFYDYDHEGRLTNVTRPTGVVTSLHREMEKSITIDIENSNRDDDVTVITNLSSVEASYTVVQDQVRNSYQLCNNGTLRVMYANGMGISFHSEPHVLAGTITPTIGRCNISLPMENGLNSIEWRLRKEQIKGKVTIFGRKLRVHGRNLLSIDYDRNIRTEKIYDDHRKFTLRIIYDQVGRPFLWLPSSGLAAVNVSYFFNGRLAGLQRGAMSERTDIDKQGRIVSRMFADGKVWSYSYLDKSMVLLLQSQRQYIFEYDSSDRLLAVTMPSVARHSMSTHTSIGYIRNIYNPPESNASVIFDYSDDGRILKTSFLGTGRQVFYKYGKLSKLSEIVYDSTAVTFGYDETTGVLKMVNLQSGGFSCTIRYRKIGPLVDKQIYRFSEEGMVNARFDYTYHDNSFRIASIKPVISETPLPVDLYRYDEISGKVEHFGKFGVIYYDINQIITTAVMTLSKHFDTHGRIKEVQYEMFRSLMYWMTVQYDSMGRVIKRELKLGPYANTTKYTYDYDGDGQLQSVAVNDRPTWRYSYDLNGNLHLLNPGNSVRLMPLRYDLRDRITRLGDVQYKIDDDGYLCQRGSDIFEYNSKGLLTRAYNKASGWSVQYRYDGVGRRASYKTNLGHHLQYFYSDLHNPTRITHVYNHSNSEITSLYYDLQGHLFAMESSSGEEYYVASDNTGTPLAVFSINGLMIKQLQYTAYGEIYYDSNPDFQMVIGFHGGLYDPLTKLVHFTQRDYDVLAGRWTSPDYTMWKNVGKEPAPFNLYMFKSNNPLSSELDLKNYVTDVKSWLVMFGFQLSNIIPGFPRAKMYFVPPPYELSESQASENGQLITGVQQTTERHNQAFMALEGQVITKKLHASIREKAGHWFATTTPIIGKGIMFAIKEGRVTTGVSSIASEDSRKVASVLNNAYYLDKMHYSIEGKDTHYFVKIGSADGDLVTLGTTIGRKVLESGVNVTVSQPTLLVNGRTRRFTNIEFQYSTLLLSIRYGLTPDTLDEEKARVLDQARQRALGTAWAKEQQKARDGREGSRLWTEGEKQQLLSTGRVQGYEGYYVLPVEQYPELADSSSNIQFLRQNEMGKR

SEQ ID NO: 19562 - protein, 2465 aa, Artificial Sequence
  Synthetic polypeptide
GLLSHVELHFLFKTSSGSTPLFSSSSPGYPLTSGTVYTPPPRLLPRNTFSRKAFKLKKPSKYCSWKCAALSAIAAALLLAILLAYFIAMHLLGLNWQLQPADGHTFNNGIRTGLPGNDDVATMPSGGKVPWSLKNSSIDSGEAEVGRRVTQEVPPGVFWRSQIHISQPQFLKFNISLGKDALFGVYIRRGLPPSHAQYDFMERLDGKEKWSVVESPRERRSIQTLVQNEAVFVQYLDVGLWHLAFYNDGKDKEMVSFNTVVLDSVQDCPRNCHGNGECVSGVCHCFPGFLGADCAKAACPVLCSGNGQYSKGTCQCYSGWKGAECDVPMNQCIDPSCGGHGSCIDGNCVCSAGYKGEHCEEVDCLDPTCSSHGVCVNGECLCSPGWGGLNCELARVQCPDQCSGHGTYLPDTGLCSCDPNWMGPDCSVEVCSVDCGTHGVCIGGACRCEEGWTGAACDQRVCHPRCIEHGTCKDGKCECREGWNGEHCTIVRETIGGECYGCPDLCNGNGRCTLGQNSWQCVCQTGWRGPGCNVAMETSCADNKDNEGDGLVDCLDPDCCLQSACQNSLLCRGSRDPLDIIQQGQTDWPAVKSFYDRIKLLAGKDSTHIIPGENPFNSSLVSLIRGQVVTTDGTPLVGVNVSFVKYPKYGYTITRQDGTFDLIANGGASLTLHFERAPFMSQERTVWLPWNSFYAMDTLVMKTEENSIPSCDLSGFVRPDPIIISSPLSTFFSAAPGQNPIVPETQVLHEEIELPGSNVKLRYLSSRTAGYKSLLKITMTQSTVPLNLIRVHLMVAVEGHLFQKSFQASPNLAYTFIWDKTDAYGQRVYGLSDAVVSVGFEYETCPSLILWEKRTALLQGFELDPSNLGGWSLDKHHILNVKSGILHKGTGENQFLTQQPAIITSIMGNGRRRSISCPSCNGLAEGNKLLAPVALAVGIDGSLYVGDFNYIRRIFPSRNVTSILELRNKEFHNNNPAHKYYLAVDPVSGSLYVSDTNSRRIYRVKSLSGTKDLAGNSEVVAGTGEQCLPFDEARCGDGGKAIDATLMSPRGIAVDKNGLMYFVDATMIRKVDQNGIISTLLGSNDLTAVRPLSCDSSMDVAQVRLEWPTDLAVNPMDNSLYVLENNVILRITENHQVSIIAGRPMHCQVPGIDYSLSKLAIHSALESASAIAISHTGVLYITETDEKKINRLRQVTTNGEICLLAGAASDCDCKNDVNCNCYSGDDAYATDAILNSPSSLAVAPDGTIYIADLGNIRIRAVSKNKPVLNAFNQYEAASPGEQELYVFNADGIHQYTVSLVTGEYLYNFTYSTDNDVTELIDNNGNSLKIRRDSSGMPRHLLMPDNQIITLTVGTNGGLKVVSTQNLELGLMTYDGNTGLLATKSDETGWTTFYDYDHEGRLTNVTRPTGVVTSLHREMEKSITIDIENSNRDDDVTVITNLSSVEASYTVVQDQVRNSYQLCNNGTLRVMYANGMGISFHSEPHVLAGTITPTIGRCNISLPMENGLNSIEWRLRKEQIKGKVTIFGRKLRVHGRNLLSIDYDRNIRTEKIYDDHRKFTLRIIYDQVGRPFLWLPSSGLAAVNVSYFFNGRLAGLQRGAMSERTDIDKQGRIVSRMFADGKVWSYSYLDKSMVLLLQSQRQYIFEYDSSDRLLAVTMPSVARHSMSTHTSIGYIRNIYNPPESNASVIFDYSDDGRILKTSFLGTGRQVFYKYGKLSKLSEIVYDSTAVTFGYDETTGVLKMVNLQSGGFSCTIRYRKIGPLVDKQIYRFSEEGMVNARFDYTYHDNSFRIASIKPVISETPLPVDLYRYDEISGKVEHFGKFGVIYYDINQIITTAVMTLSKHFDTHGRIKEVQYEMFRSLMYWMTVQYDSMGRVIKRELKLGPYANTTKYTYDYDGDGQLQSVAVNDRPTWRYSYDLNGNLHLLNPGNSVRLMPLRYDLRDRITRLGDVQYKIDDDGYLCQRGSDIFEYNSKGLLTRAYNKASGWSVQYRYDGVGRRASYKTNLGHHLQYFYSDLHNPTRITHVYNHSNSEITSLYYDLQGHLFAMESSSGEEYYVASDNTGTPLAVFSINGLMIKQLQYTAYGEIYYDSNPDFQMVIGFHGGLYDPLTKLVHFTQRDYDVLAGRWTSPDYTMWKNVGKEPAPFNLYMFKSNNPLSSELDLKNYVTDVKSWLVMFGFQLSNIIPGFPRAKMYFVPPPYELSESQASENGQLITGVQQTTERHNQAFMALEGQVITKKLHASIREKAGHWFATTTPIIGKGIMFAIKEGRVTTGVSSIASEDSRKVASVLNNAYYLDKMHYSIEGKDTHYFVKIGSADGDLVTLGTTIGRKVLESGVNVTVSQPTLLVNGRTRRFTNIEFQYSTLLLSIRYGLTPDTLDEEKARVLDQARQRALGTAWAKEQQKARDGREGSRLWTEGEKQQLLSTGRVQGYEGYYVLPVEQYPELADSSSNIQFLRQNEMGKR

SEQ ID NO: 19563 - protein, 2418 aa, Artificial Sequence
  Synthetic polypeptide
GLLSHVELHFLFKTSSGSTPLFSSSSPGYPLTSGTVYTPPPRLLPRNTFSRKAFKLKKPSKYCSWKCAALSAIAAALLLAILLAYFIVPWSLKNSSIDSGEAEVGRRVTQEVPPGVFWRSQIHISQPQFLKFNISLGKDALFGVYIRRGLPPSHAQYDFMERLDGKEKWSVVESPRERRSIQTLVQNEAVFVQYLDVGLWHLAFYNDGKDKEMVSFNTVVLDSVQDCPRNCHGNGECVSGVCHCFPGFLGADCAKAACPVLCSGNGQYSKGTCQCYSGWKGAECDVPMNQCIDPSCGGHGSCIDGNCVCSAGYKGEHCEEVDCLDPTCSSHGVCVNGECLCSPGWGGLNCELARVQCPDQCSGHGTYLPDTGLCSCDPNWMGPDCSVEVCSVDCGTHGVCIGGACRCEEGWTGAACDQRVCHPRCIEHGTCKDGKCECREGWNGEHCTIGRQTAGTETDGCPDLCNGNGRCTLGQNSWQCVCQTGWRGPGCNVAMETSCADNKDNEGDGLVDCLDPDCCLQSACQNSLLCRGSRDPLDIIQQGQTDWPAVKSFYDRIKLLAGKDSTHIIPGENPFNSSLVSLIRGQVVTTDGTPLVGVNVSFVKYPKYGYTITRQDGTFDLIANGGASLTLHFERAPFMSQERTVWLPWNSFYAMDTLVMKTEENSIPSCDLSGFVRPDPIIISSPLSTFFSAAPGQNPIVPETQVLHEEIELPGSNVKLRYLSSRTAGYKSLLKITMTQSTVPLNLIRVHLMVAVEGHLFQKSFQASPNLAYTFIWDKTDAYGQRVYGLSDAVVSVGFEYETCPSLILWEKRTALLQGFELDPSNLGGWSLDKHHILNVKSGILHKGTGENQFLTQQPAIITSIMGNGRRRSISCPSCNGLAEGNKLLAPVALAVGIDGSLYVGDFNYIRRIFPSRNVTSILELRNNPAHKYYLAVDPVSGSLYVSDTNSRRIYRVKSLSGTKDLAGNSEVVAGTGEQCLPFDEARCGDGGKAIDATLMSPRGIAVDKNGLMYFVDATMIRKVDQNGIISTLLGSNDLTAVRPLSCDSSMDVAQVRLEWPTDLAVNPMDNSLYVLENNVILRITENHQVSIIAGRPMHCQVPGIDYSLSKLAIHSALESASAIAISHTGVLYITETDEKKINRLRQVTTNGEICLLAGAASDCDCKNDVNCNCYSGDDAYATDAILNSPSSLAVAPDGTIYIADLGNIRIRAVSKNKPVLNAFNQYEAASPGEQELYVFNADGIHQYTVSLVTGEYLYNFTYSTDNDVTELIDNNGNSLKIRRDSSGMPRHLLMPDNQIITLTVGTNGGLKVVSTQNLELGLMTYDGNTGLLATKSDETGWTTFYDYDHEGRLTNVTRPTGVVTSLHREMEKSITIDIENSNRDDDVTVITNLSSVEASYTVVQDQVRNSYQLCNNGTLRVMYANGMGISFHSEPHVLAGTITPTIGRCNISLPMENGLNSIEWRLRKEQIKGKVTIFGRKLRVHGRNLLSIDYDRNIRTEKIYDDHRKFTLRIIYDQVGRPFLWLPSSGLAAVNVSYFFNGRLAGLQRGAMSERTDIDKQGRIVSRMFADGKVWSYSYLDKSMVLLLQSQRQYIFEYDSSDRLLAVTMPSVARHSMSTHTSIGYIRNIYNPPESNASVIFDYSDDGRILKTSFLGTGRQVFYKYGKLSKLSEIVYDSTAVTFGYDETTGVLKMVNLQSGGFSCTIRYRKIGPLVDKQIYRFSEEGMVNARFDYTYHDNSFRIASIKPVISETPLPVDLYRYDEISGKVEHFGKFGVIYYDINQIITTAVMTLSKHFDTHGRIKEVQYEMFRSLMYWMTVQYDSMGRVIKRELKLGPYANTTKYTYDYDGDGQLQSVAVNDRPTWRYSYDLNGNLHLLNPGNSVRLMPLRYDLRDRITRLGDVQYKIDDDGYLCQRGSDIFEYNSKGLLTRAYNKASGWSVQYRYDGVGRRASYKTNLGHHLQYFYSDLHNPTRITHVYNHSNSEITSLYYDLQGHLFAMESSSGEEYYVASDNTGTPLAVFSINGLMIKQLQYTAYGEIYYDSNPDFQMVIGFHGGLYDPLTKLVHFTQRDYDVLAGRWTSPDYTMWKNVGKEPAPFNLYMFKSNNPLSSELDLKNYVTDVKSWLVMFGFQLSNIIPGFPRAKMYFVPPPYELSESQASENGQLITGVQQTTERHNQAFMALEGQVITKKLHASIREKAGHWFATTTPIIGKGIMFAIKEGRVTTGVSSIASEDSRKVASVLNNAYYLDKMHYSIEGKDTHYFVKIGSADGDLVTLGTTIGRKVLESGVNVTVSQPTLLVNGRTRRFTNIEFQYSTLLLSIRYGLTPDTLDEEKARVLDQARQRALGTAWAKEQQKARDGREGSRLWTEGEKQQLLSTGRVQGYEGYYVLPVEQYPELADSSSNIQFLRQNEMGKR

SEQ ID NO: 19564 - protein, 71 aa, Artificial Sequence
  Synthetic polypeptide
ISLMRSDGFIRGSFPTQALSLPAVIHVRRDLLLLAFCHDCEASSAMWNCTSSSRPPRGAHPCSAALPRDTL

SEQ ID NO: 19565 - protein, 35 aa, Artificial Sequence
  Synthetic polypeptide
AEIVSLHSSLGDRAPGTPRASAAPERRASEPDPAE

SEQ ID NO: 19566 - protein, 441 aa, Artificial Sequence
  Synthetic polypeptide
SQLLGRLRQENHLNPGGGGCSEPRLCHYTPAWATGRQELRELRLLQKEEHRNQTQLSNKHELQLEQMHKRFEQEINAKKKFFDTELENLERQQKQQVEKMEQDHAVRRREEARRIRLEQDRDYTRFQEQLKLMKKEVKNEVEKLPRQQRKESMKQKMEEHTQKKQLLDRDFVAKQKEDLELAMKRLTTDNRREICDKERECLMKKQELLRDREAALWEMEEHQLQERHQLVKQQLKDQYFLQRHELLRKHEKEREQMQRYNQRMIEQLKVRQQQEKARLPKIQRSEGKTRMAMYKKSLHINGGGSAAEQREKIKQFSQQEEKRQKSERLQQQQKHENQMRDMLAQCESNMSELQQLQNEKCHLLVEHETQKLKALDESHNQNLKEWRDKLRPRKKALEEDLNQKKREQEMFFKLSEEAECPNPSTPSKAAKFFPYSSADAS

SEQ ID NO: 19567 - protein, 42 aa, Artificial Sequence
  Synthetic polypeptide
TQEAEVAVSRDCVTTLQPGRQGARNSESFGCSRKKSIGTRPS

SEQ ID NO: 19568 - protein, 29 aa, Artificial Sequence
  Synthetic polypeptide
AGWQLRIPSSAASPVTRLCGSWWLRPRPR

SEQ ID NO: 19569 - protein, 715 aa, Artificial Sequence
  Synthetic polypeptide
GAGSRGWRRGSGVACQGRREPSPVMEMFCILSWVAVTHPFVSSITSNKALRELVAEAKAEVMEEIEDGRDEGEEEDAVDAASTLENHTQNSSEVSPPSLNADKPLEESPSTPLAPSQSQDSVNEPCSQPSGDRSLQTTSPPVVAPGNENGLAVPVPLRKSRPVSMDARIQVAQEKQVAEQGGDLSPAANRSQKASQSRPNSSALETLGGEKLANGSLEPPAQAAPGPSKRDSDCSSLCTSESMDYGTNLSTDLSLNKEMGSLSIKDPKLYKKTLKRTRKFVVDGVEVSITTSKIISEDEKKDEEMRFLRRQELRELRLLQKEEHRNQTQLSNKHELQLEQMHKRFEQEINAKKKFFDTELENLERQQKQQVEKMEQDHAVRRREEARRIRLEQDRDYTRFQEQLKLMKKEVKNEVEKLPRQQRKESMKQKMEEHTQKKQLLDRDFVAKQKEDLELAMKRLTTDNRREICDKERECLMKKQELLRDREAALWEMEEHQLQERHQLVKQQLKDQYFLQRHELLRKHEKEREQMQRYNQRMIEQLKVRQQQEKARLPKIQRSEGKTRMAMYKKSLHINGGGSAAEQREKIKQFSQQEEKRQKSERLQQQQKHENQMRDMLAQCESNMSELQQLQNEKCHLLVEHETQKLKALDESHNQNLKEWRDKLRPRKKALEEDLNQKKREQEMFFKLSEEAECPNPSTPSKAAKFFPYSSADAS

SEQ ID NO: 19570 - protein, 73 aa, Artificial Sequence
  Synthetic polypeptide
VNLTVMTLSKGSQRERLHTRCSVSRKLRSRLPRLAAWEWGCLPRETGAFPGDGNVLYLELGGSYASLRQQHHQ

SEQ ID NO: 19571 - protein, 795 aa, Artificial Sequence
  Synthetic polypeptide
ADFGVSAKNLKTLQKRDSFIGTPYWMAPEVVMCETMKDTPYDYKADIWSLGITLIEMAQIEPPHHELNPMRVLLKIAKSDPPTLLTPSKWSVEFRDFLKIALDKNPETRPSAAQLLEHPFVSSITSNKALRELVAEAKAEVMEEIEDGRDEGEEEDAVDAASTLENHTQNSSEVSPPSLNADKPLEESPSTPLAPSQSQDSVNEPCSQPSGDRSLQTTSPPVVAPGNENGLAVPVPLRKSRPVSMDARIQVAQEKQVAEQGGDLSPAANRSQKASQSRPNSSALETLGGEKLANGSLEPPAQAAPGPSKRDSDCSSLCTSESMDYGTNLSTDLSLNKEMGSLSIKDPKLYKKTLKRTRKFVVDGVEVSITTSKIISEDEKKDEEMRFLRRQELRELRLLQKEEHRNQTQLSNKHELQLEQMHKRFEQEINAKKKFFDTELENLERQQKQQVEKMEQDHAVRRREEARRIRLEQDRDYTRFQEQLKLMKKEVKNEVEKLPRQQRKESMKQKMEEHTQKKQLLDRDFVAKQKEDLELAMKRLTTDNRREICDKERECLMKKQELLRDREAALWEMEEHQLQERHQLVKQQLKDQYFLQRHELLRKHEKEREQMQRYNQRMIEQLKVRQQQEKARLPKIQRSEGKTRMAMYKKSLHINGGGSAAEQREKIKQFSQQEEKRQKSERLQQQQKHENQMRDMLAQCESNMSELQQLQNEKCHLLVEHETQKLKALDESHNQNLKEWRDKLRPRKKALEEDLNQKKREQEMFFKLSEEAECPNPSTPSKAAKFFPYSSADAS

SEQ ID NO: 19572 - protein, 31 aa, Artificial Sequence
  Synthetic polypeptide
KYKKISQAWWRAPVVPATREAELTLVCLPRI

SEQ ID NO: 19573 - protein, 8 aa, Artificial Sequence
  Synthetic polypeptide
SQLLGRLS

SEQ ID NO: 19574 - protein, 22 aa, Artificial Sequence
  Synthetic polypeptide
LPVFLNEEISQKIPDFGLLCQE

SEQ ID NO: 19575 - protein, 930 aa, Artificial Sequence
  Synthetic polypeptide
MKRFHRKSQISVFSAKNKETGALAAAKVIETKSEEELEDYIVEIEILATCDHPYIVKLLGAYYHDGKLWIMIEFCPGGAVDAIMLELDRGLTEPQIQVVCRQMLEALNFLHSKRIIHRDLKAGNVLMTLEGDIRLADFGVSAKNLKTLQKRDSFIGTPYWMAPEVVMCETMKDTPYDYKADIWSLGITLIEMAQIEPPHHELNPMRVLLKIAKSDPPTLLTPSKWSVEFRDFLKIALDKNPETRPSAAQLLEHPFVSSITSNKALRELVAEAKAEVMEEIEDGRDEGEEEDAVDAASTLENHTQNSSEVSPPSLNADKPLEESPSTPLAPSQSQDSVNEPCSQPSGDRSLQTTSPPVVAPGNENGLAVPVPLRKSRPVSMDARIQVAQEKQVAEQGGDLSPAANRSQKASQSRPNSSALETLGGEKLANGSLEPPAQAAPGPSKRDSDCSSLCTSESMDYGTNLSTDLSLNKEMGSLSIKDPKLYKKTLKRTRKFVVDGVEVSITTSKIISEDEKKDEEMRFLRRQELRELRLLQKEEHRNQTQLSNKHELQLEQMHKRFEQEINAKKKFFDTELENLERQQKQQVEKMEQDHAVRRREEARRIRLEQDRDYTRFQEQLKLMKKEVKNEVEKLPRQQRKESMKQKMEEHTQKKQLLDRDFVAKQKEDLELAMKRLTTDNRREICDKERECLMKKQELLRDREAALWEMEEHQLQERHQLVKQQLKDQYFLQRHELLRKHEKEREQMQRYNQRMIEQLKVRQQQEKARLPKIQRSEGKTRMAMYKKSLHINGGGSAAEQREKIKQFSQQEEKRQKSERLQQQQKHENQMRDMLAQCESNMSELQQLQNEKCHLLVEHETQKLKALDESHNQNLKEWRDKLRPRKKALEEDLNQKKREQEMFFKLSEEAECPNPSTPSKAAKFFPYSSADAS

SEQ ID NO: 19576 - protein, 54 aa, Artificial Sequence
  Synthetic polypeptide
RDFTENPRFRSSLPRIRRRVLWLRPKSLKPRVRRSWRTTSWRLRSWPPATTPTL

SEQ ID NO: 19577 - protein, 34 aa, Artificial Sequence
  Synthetic polypeptide
ELMNEDESASSSPQMPYPEGRSMRSTSRCTSRKT

SEQ ID NO: 19578 - protein, 19 aa, Artificial Sequence
  Synthetic polypeptide
MRMNQPPHPPRCHTPREDL

SEQ ID NO: 19579 - protein, 70 aa, Artificial Sequence
  Synthetic polypeptide
ISRGSGCVRWRAEQHDGAPGPGRGPRQLSQHPQPPQWSQQPLPNRGAACGQLGPVLRAAVAGPAGPGLLH

SEQ ID NO: 19580 - protein, 26 aa, Artificial Sequence
  Synthetic polypeptide
KWTASGPILDLLNLNLQRFWLCQMES

SEQ ID NO: 19581 - protein, 589 aa, Artificial Sequence
  Synthetic polypeptide
STTHRVVPEPAASASPGSLVEMDSLRPHLGPTEPESPEVLAVSDGELSSTTGPQGQGEGRGSSLSIHSLPSGPSSPFPTEEQPVASWALSFERLLQDPLGLAYFTEFLKKEFSAENVTFWKACERFQQIPASDTQQLAQEARNIYQEFLSSQALSPVNIDRQAWLGEEVLAEPRPDMFRAQQLQIFNLMKFDSYARFVKSPLYRECLLAEAEGRPLREPGSSRLGSPDATRKKPKLKPGKSLPLGVEELGQLPPVEGPGGRPLRKSFRRELGGTANAALRRESQGSLNSSASLDLGFLAFVSSKSESHRKSLGSTEGESESRPGKYCCVYLPDGTASLALARPGLTIRDMLAGICEKRGLSLPDIKVYLVGNEQALVLDQDCTVLADQEVRLENRITFELELTALERVVRISAKPTKRLQEALQPILEKHGLSPLEVVLHRPGEKQPLDLGKLVSSVAAQRLVLDTLPGVKISKARDKSPCRSQGCPPRTQDKATHPPPASPSSLVKVPSSATGKRQTCDIEGLVELLNRVQSSGAHDQRGLLRKEDLVLPEFLQLPAQGPSSEETPPQTKSAAQPIGGSLNSTTDSAL

SEQ ID NO: 19582 - protein, 51 aa, Artificial Sequence
  Synthetic polypeptide
AWRFVPVIPALWEAEARGSPEVRSSRPACPIWGQGRPPQDPQMPSLPRGAW

SEQ ID NO: 19583 - protein, 64 aa, Artificial Sequence
  Synthetic polypeptide
AWRFVPVIPALWEAEARGSPEVRSSRPACPIWGQGRPPQDPQMPSLPRGAWSPWRKTPSTPPGR

SEQ ID NO: 19584 - protein, 83 aa, Artificial Sequence
  Synthetic polypeptide
AWRFVPVIPALWEAEARGSPEVRSSRPACPIWGQGRPPQDPQMPSLPRGAWSPWRKTPSTPPGRKWASFPWWCRGLRPPPAAS

SEQ ID NO: 19585 - protein, 31 aa, Artificial Sequence
  Synthetic polypeptide
GQEFETSLPNMGTGEASSGSTDAQSPKRGLV

SEQ ID NO: 19586 - protein, 43 aa, Artificial Sequence
  Synthetic polypeptide
GQEFETSLPNMGTGEASSGSTDAQSPKRGLVPMEENSIYSSWQ

SEQ ID NO: 19587 - protein, 100 aa, Artificial Sequence
  Synthetic polypeptide
GQEFETSLPNMGTGEASSGSTDAQSPKRGLVPMEENSIYSSWQEVGEFPVVVQRTEAATRCQLKGPALLVLGPDAIQLREAKGTQALYSWPYHFLRKFGS

SEQ ID NO: 19588 - protein, 327 aa, Artificial Sequence
  Synthetic polypeptide
GQEFETSLPNMGTGEASSGSTDAQSPKRGLVPMEENSIYSSWQEVGEFPVVVQRTEAATRCQLKGPALLVLGPDAIQLREAKGTQALYSWPYHFLRKFGSDKGVFSFEAGRRCHSGEGLFAFSTPCAPDLCRAVAGAIARQRERLPELTRPQPCPLPRATSLPSLDTPGELREMPPGPEPPTSRKMHLAEPGPQSLPLLLGPEPNDLASGLYASVCKRASGPPGNEHLYENLCVLEASPTLHGGEPEPHEGPGSRSPTTSPIYHNGQDLSWPGPANDSTLEAQYRRLLELDQVEGTGRPDPQAGFKAKLVTLLSRERRKGPAPCDRP

SEQ ID NO: 19589 - protein, 217 aa, Artificial Sequence
  Synthetic polypeptide
GQEFETSLPNMGTGEASSGSTDAQSPKRGLVPMEENSIYSSWQEVGEFPVVVQRTEAATRCQLKGPALLVLGPDAIQLREAKGTQALYSWPYHFLRKFGSDKILLGTPGVSLLICKGERTDDVSGIILDESLLRAYSVPGAGGHSRVQDSLGPVLREPTFQGERSFLKTSMLRSLLCSCSWRHPRSQPRTQASCLQGSDCPAPHRNSTSAAHTLGTS

SEQ ID NO: 19590 - protein, 44 aa, Artificial Sequence
  Synthetic polypeptide
SQHFGKPKHVDHLRSGVRDQPAQYGDRGGLLRIHRCPVSQEGPG

SEQ ID NO: 19591 - protein, 57 aa, Artificial Sequence
  Synthetic polypeptide
SQHFGKPKHVDHLRSGVRDQPAQYGDRGGLLRIHRCPVSQEGPGPHGGKLHLLLLAG

SEQ ID NO: 19592 - protein, 68 aa, Artificial Sequence
  Synthetic polypeptide
SQHFGKPKHVDHLRSGVRDQPAQYGDRGGLLRIHRCPVSQEGPGPHGGKLHLLLLAGSGRVSRGGAED

SEQ ID NO: 19593 - protein, 25 aa, Artificial Sequence
  Synthetic polypeptide
EMYRQGDRGGLLRIHRCPVSQEGPG

SEQ ID NO: 19594 - protein, 38 aa, Artificial Sequence
  Synthetic polypeptide
EMYRQGDRGGLLRIHRCPVSQEGPGPHGGKLHLLLLAG

SEQ ID NO: 19595 - protein, 49 aa, Artificial Sequence
  Synthetic polypeptide
EMYRQGDRGGLLRIHRCPVSQEGPGPHGGKLHLLLLAGSGRVSRGGAED

SEQ ID NO: 19596 - protein, 25 aa, Artificial Sequence
  Synthetic polypeptide
KCTDKGTGEASSGSTDAQSPKRGLV

SEQ ID NO: 19597 - protein, 37 aa, Artificial Sequence
  Synthetic polypeptide
KCTDKGTGEASSGSTDAQSPKRGLVPMEENSIYSSWQ

SEQ ID NO: 19598 - protein, 94 aa, Artificial Sequence
  Synthetic polypeptide
KCTDKGTGEASSGSTDAQSPKRGLVPMEENSIYSSWQEVGEFPVVVQRTEAATRCQLKGPALLVLGPDAIQLREAKGTQALYSWPYHFLRKFGS

SEQ ID NO: 19599 - protein, 321 aa, Artificial Sequence
  Synthetic polypeptide
KCTDKGTGEASSGSTDAQSPKRGLVPMEENSIYSSWQEVGEFPVVVQRTEAATRCQLKGPALLVLGPDAIQLREAKGTQALYSWPYHFLRKFGSDKGVFSFEAGRRCHSGEGLFAFSTPCAPDLCRAVAGAIARQRERLPELTRPQPCPLPRATSLPSLDTPGELREMPPGPEPPTSRKMHLAEPGPQSLPLLLGPEPNDLASGLYASVCKRASGPPGNEHLYENLCVLEASPTLHGGEPEPHEGPGSRSPTTSPIYHNGQDLSWPGPANDSTLEAQYRRLLELDQVEGTGRPDPQAGFKAKLVTLLSRERRKGPAPCDRP

SEQ ID NO: 19600 - protein, 211 aa, Artificial Sequence
  Synthetic polypeptide
KCTDKGTGEASSGSTDAQSPKRGLVPMEENSIYSSWQEVGEFPVVVQRTEAATRCQLKGPALLVLGPDAIQLREAKGTQALYSWPYHFLRKFGSDKILLGTPGVSLLICKGERTDDVSGIILDESLLRAYSVPGAGGHSRVQDSLGPVLREPTFQGERSFLKTSMLRSLLCSCSWRHPRSQPRTQASCLQGSDCPAPHRNSTSAAHTLGTS

SEQ ID NO: 19601 - protein, 24 aa, Artificial Sequence
  Synthetic polypeptide
NVQTRGQGRPPQDPQMPSLPRGAW

SEQ ID NO: 19602 - protein, 37 aa, Artificial Sequence
  Synthetic polypeptide
NVQTRGQGRPPQDPQMPSLPRGAWSPWRKTPSTPPGR

SEQ ID NO: 19603 - protein, 56 aa, Artificial Sequence
  Synthetic polypeptide
NVQTRGQGRPPQDPQMPSLPRGAWSPWRKTPSTPPGRKWASFPWWCRGLRPPPAAS

SEQ ID NO: 19604 - protein, 44 aa, Artificial Sequence
  Synthetic polypeptide
LVPPVSPLPSPVHDPEVSLDPEERKVIGASVERRENEGSPAGKE

SEQ ID NO: 19605 - protein, 86 aa, Artificial Sequence
  Synthetic polypeptide
PLSPGLGLQLTGSPCVPIAKSSARPRGFPGPRGEKGDRSERGEKGERGVPGRKGVKGQKGEPGPPGLDQPCPVGPDGLPVPGCWHK

SEQ ID NO: 19606 - protein, 40 aa, Artificial Sequence
  Synthetic polypeptide
YSSVTPFPRAGTATDWFPLCPHCQVQCTTQRFPWTPRRER

SEQ ID NO: 19607 - protein, 22 aa, Artificial Sequence
  Synthetic polypeptide
ARIAPLHSSLDNGARLCLLATR

SEQ ID NO: 19608 - protein, 30 aa, Artificial Sequence
  Synthetic polypeptide
ARIAPLHSSLDNGARLCLLATRTTWCECGR

SEQ ID NO: 19609 - protein, 47 aa, Artificial Sequence
  Synthetic polypeptide
RRCGTCLLEAEVGGSLELQGLKAVVSQDRTPALQPRQWSKTLFAGYT

SEQ ID NO: 19610 - protein, 56 aa, Artificial Sequence
  Synthetic polypeptide
RRCGTCLLEAEVGGSLELQGLKAVVSQDRTPALQPRQWSKTLFAGYTDNLVRVWQV

SEQ ID NO: 19611 - protein, 61 aa, Artificial Sequence
  Synthetic polypeptide
RRCGTCLLEAEVGGSLELQGLKAVVSQDRTPALQPRQWSKTLFAGYTDNLVRVWQVTIGTR

SEQ ID NO: 19612 - protein, 12 aa, Artificial Sequence
  Synthetic polypeptide
TMEQDSVCWLHG

SEQ ID NO: 19613 - protein, 20 aa, Artificial Sequence
  Synthetic polypeptide
TMEQDSVCWLHGQPGASVAG

SEQ ID NO: 19614 - protein, 26 aa, Artificial Sequence
  Synthetic polypeptide
TMEQDSVCWLHGQPGASVAGDHWHTL

SEQ ID NO: 19615 - protein, 20 aa, Artificial Sequence
  Synthetic polypeptide
GLPNCAELCICTPGQGHRCR

SEQ ID NO: 19616 - protein, 660 aa, Artificial Sequence
  Synthetic polypeptide
SSAISSACTSPSWHLVKKVPCFPFAFCHDCKFPEDSPTVLNCAYVLQVKATDADDPTYGNSARVVYSILQGQPYFSIDPKTGVIRTALPNMDREVKEQYQVLIQAKDMGGQLGGLAGTTIVNITLTDVNDNPPRFPKSIFHLKVPESSPIGSAIGRIRAVDPDFGQNAEIEYNIVPGDGGNLFDIVTDEDTQEGVIKLKKPLDFETKKAYTFKVEASNLHLDHRFHSAGPFKDTATVKISVLDVDEPPVFSKPLYTMEVYEDTPVGTIIGAVTAQDLDVGSSAVRYFIDWKSDGDSYFTIDGNEGTIATNELLDRESTAQYNFSIIASKVSNPLLTSKVNILINVLDVNEFPPEISVPYETAVCENAKPGQIIQIVSAADRDLSPAGQQFSFRLSPEAAIKPNFTVRDFRNNTAGIETRRNGYSRRQQELYFLPVVIEDSSYPVQSSTNTMTIRVCRCDSDGTILSCNVEAIFLPVGLSTGALIAILLCIVILLAIVVLYVALRRQKKKDTLMTSKEDIRDNVIHYDDEGGGEEDTQAFDIGALRNPKVIEENKIRRDIKPDSLCLPRQRPPMEDNTDIRDFIHQRLQENDVDPTAPPYDSLATYAYEGSGSVAESLSSIDSLTTEADQDYDYLTDWGPRFKVLADMFGEEESYNPDKVT

SEQ ID NO: 19617 - protein, 74 aa, Artificial Sequence
  Synthetic polypeptide
TVHMYSRSRPQMQMTRPMETVPESFTAFFRDNLISLLIPRQVLLEQLCQTWTEKSKNNIKYSSKPRIWEDSLED

SEQ ID NO: 19618 - protein, 31 aa, Artificial Sequence
  Synthetic polypeptide
LNGPAPFRLRQGRGHCEIHPLRRWRWHRFYH

SEQ ID NO: 19619 - protein, 731 aa, Artificial Sequence
  Synthetic polypeptide
NPRDLVYLPDSMARLHSDLDKGEGTVKYTLSGDGAGTVFTIDETTGDIHAIRSLDREEKPFYTLRAQAVDIETRKPLEPESEFIIKVQDINDNEPKFLDGPYVATVPEMSPVGAYVLQVKATDADDPTYGNSARVVYSILQGQPYFSIDPKTGVIRTALPNMDREVKEQYQVLIQAKDMGGQLGGLAGTTIVNITLTDVNDNPPRFPKSIFHLKVPESSPIGSAIGRIRAVDPDFGQNAEIEYNIVPGDGGNLFDIVTDEDTQEGVIKLKKPLDFETKKAYTFKVEASNLHLDHRFHSAGPFKDTATVKISVLDVDEPPVFSKPLYTMEVYEDTPVGTIIGAVTAQDLDVGSSAVRYFIDWKSDGDSYFTIDGNEGTIATNELLDRESTAQYNFSIIASKVSNPLLTSKVNILINVLDVNEFPPEISVPYETAVCENAKPGQIIQIVSAADRDLSPAGQQFSFRLSPEAAIKPNFTVRDFRNNTAGIETRRNGYSRRQQELYFLPVVIEDSSYPVQSSTNTMTIRVCRCDSDGTILSCNVEAIFLPVGLSTGALIAILLCIVILLAIVVLYVALRRQKKKDTLMTSKEDIRDNVIHYDDEGGGEEDTQAFDIGALRNPKVIEENKIRRDIKPDSLCLPRQRPPMEDNTDIRDFIHQRLQENDVDPTAPPYDSLATYAYEGSGSVAESLSSIDSLTTEADQDYDYLTDWGPRFKVLADMFGEEESYNPDKVT

SEQ ID NO: 19620 - protein, 691 aa, Artificial Sequence
  Synthetic polypeptide
NPRDLVYLPDSMARLHSDLDKGEGTVKYTLSGDGAGTVFTIDETTGDIHAIRSLDREEKPFYTLRAQAVDIETRKPLEPESEFIIKVQDINDNEPKFLDGPYVATVPEMSPVGVIRTALPNMDREVKEQYQVLIQAKDMGGQLGGLAGTTIVNITLTDVNDNPPRFPKSIFHLKVPESSPIGSAIGRIRAVDPDFGQNAEIEYNIVPGDGGNLFDIVTDEDTQEGVIKLKKPLDFETKKAYTFKVEASNLHLDHRFHSAGPFKDTATVKISVLDVDEPPVFSKPLYTMEVYEDTPVGTIIGAVTAQDLDVGSSAVRYFIDWKSDGDSYFTIDGNEGTIATNELLDRESTAQYNFSIIASKVSNPLLTSKVNILINVLDVNEFPPEISVPYETAVCENAKPGQIIQIVSAADRDLSPAGQQFSFRLSPEAAIKPNFTVRDFRNNTAGIETRRNGYSRRQQELYFLPVVIEDSSYPVQSSTNTMTIRVCRCDSDGTILSCNVEAIFLPVGLSTGALIAILLCIVILLAIVVLYVALRRQKKKDTLMTSKEDIRDNVIHYDDEGGGEEDTQAFDIGALRNPKVIEENKIRRDIKPDSLCLPRQRPPMEDNTDIRDFIHQRLQENDVDPTAPPYDSLATYAYEGSGSVAESLSSIDSLTTEADQDYDYLTDWGPRFKVLADMFGEEESYNPDKVT

SEQ ID NO: 19621 - protein, 23 aa, Artificial Sequence
  Synthetic polypeptide
NTGIEIQETWFIFLTQWPGSIPT

SEQ ID NO: 19622 - protein, 80 aa, Artificial Sequence
  Synthetic polypeptide
PQGTFGNIWRHFWLSHLGKTLLAPSSYIQTRIEEMDHLNISFQEMEQEISSLLMKTQATYRPPRGWTGKKNPFTSFELKL

SEQ ID NO: 19623 - protein, 31 aa, Artificial Sequence
  Synthetic polypeptide
PRGHLEISGDIFGCHILGRRYWHLVVTFRPG

SEQ ID NO: 19624 - protein, 114 aa, Artificial Sequence
  Synthetic polypeptide
EKRKRQRQEEGENRRREWKERYGHNREDSTRNRNIHTDPKESNFSDVNTNRSAFKYTRANNRTERDRIELLQDAEPLDFNAETFTDDPLESESGRYQPGGRYLSMSRSDIFNDV

SEQ ID NO: 19625 - protein, 75 aa, Artificial Sequence
  Synthetic polypeptide
RRHSLLSKRREKGKGKKKVKIEEENGKNVMDTIEKIPLGTEIFILTPKSQTSQMLIPTVLHSNIPGLITGLKGTG

SEQ ID NO: 19626 - protein, 12 aa, Artificial Sequence
  Synthetic polypeptide
VREEKKAKARRR

SEQ ID NO: 19627 - protein, 13 aa, Artificial Sequence
  Synthetic polypeptide
CRATPIILRRFVK

SEQ ID NO: 19628 - protein, 3 aa, Artificial Sequence
  Synthetic polypeptide
GGS

SEQ ID NO: 19629 - protein, 456 aa, Artificial Sequence
  Synthetic polypeptide
IVQGYAYYFEEVRKVNESIKYNHPLRKCVDTILKKCPTEYQEKMGRNMDDYEDFDEKHSIYPSEKSLVKLHKQVIYSVQRHRRTQVQWQILLEQAFYLEDVAKNETSATHQFVHTFQSPEPENRFIQYFYNPTFEWYWECLLRPWFYKILAVVLSIFSVIVVWSECTFFSTTPVLSLFAVFIQLAEKTYNYIYIEIACFLSIFFLSICVYSTVFRIRVFNYYYLASHHQTDAYSLLFSGMLFCRLTPPLCLNFLGLTHMDSSISHKNTQPTAYTSIMGSMKVLSFIADGFYIYYPMLVVILCIATYFSLGTRCLNLLGFQQFMGDDDMTSDLVNEGKELIRKEKRKRQRQEEGENRRREWKERYGHNREDSTRNRNIHTDPKESNFSDVNTNRSAFKYTRANNRTERDRIELLQDAEPLDFNAETFTDDPLESESGRYQPGGRYLSMSRSDIFNDV

SEQ ID NO: 19630 - protein, 56 aa, Artificial Sequence
  Synthetic polypeptide
HSLYTSVSQAANEEFISFCNLQGSYRCEYSSTSYISQVWSEKSVKIQICRPSELLL

SEQ ID NO: 19631 - protein, 43 aa, Artificial Sequence
  Synthetic polypeptide
TLSTPQFPKLQMKNLYHSATYRVAIGASIRQPVISAKFGARSQ

SEQ ID NO: 19632 - protein, 226 aa, Artificial Sequence
  Synthetic polypeptide
AFQCIEVMQACVAEDQLVVKWQSSALDVNTWMIEWFPDVDSEPTTLSWESVSQATNWTIQQDKLKPFWCYNISVYPMLHDKVGEPYSIQAYAKEGVPSEGPETKVENIGVKTVTITWKEIPKSERKGIICNYTIFYQAEGGKGFCKHAHSEVEKNPKPQIDAMDRPVVGMAPPSHCDLQPGMNHLASLNLSENGAKSTHLLGFWGLNESEVTVPERRVLRKWKELL

SEQ ID NO: 19633 - protein, 325 aa, Artificial Sequence
  Synthetic polypeptide
AFQCIEVMQACVAEDQLVVKWQSSALDVNTWMIEWFPDVDSEPTTLSWESVSQATNWTIQQDKLKPFWCYNISVYPMLHDKVGEPYSIQAYAKEGVPSEGPETKVENIGVKTVTITWKEIPKSERKGIICNYTIFYQAEGGKGFSKTVNSSILQYGLESLKRKTSYIVQVMASTSAGGTNGTSINFKTLSFSVFEIILITSLIGGGLLILIILTVAYGLKKPNKLTHLCWPTVPNPAESSIATWHGDDFKDKLNLKESDDSVNTEDRILKPCSTPSDKLVIDKLVVNFGNVLQEIFTDEARTGQENNLGGEKNGTRILSSCPTSI

SEQ ID NO: 19634 - protein, 408 aa, Artificial Sequence
  Synthetic polypeptide
AFQCIEVMQACVAEDQLVVKWQSSALDVNTWMIEWFPDVDSEPTTLSWESVSQATNWTIQQDKLKPFWCYNISVYPMLHDKVGEPYSIQAYAKEGVPSEGPETKVENIGVKTVTITWKEIPKSERKGIICNYTIFYQAEGGKGFSKTVNSSILQYGLESLKRKTSYIVQVMASTSAGGTNGTSINFKTLSFSVFEIILITSLIGGGLLILIILTVAYGLKKPNKLTHLCWPTVPNPAESSIATWHGDDFKDKLNLKESDDSVNTEDRILKPCSTPSDKLVIDKLVVNFGNVLQEIFTDEARTGQENNLGGEKNGYVTCPFRPDCPLGKSFEELPVSPEIPPRKSQYLRSRMPEGTRPEAKEQLLFSGQSLVPDHLCEEGAPNPYLKNSVTAREFLVSEKLPEHTKGEV

SEQ ID NO: 19635 - protein, 28 aa, Artificial Sequence
  Synthetic polypeptide
MGVVARACNPSTLGDRLSWADHLSISVH

SEQ ID NO: 19636 - protein, 31 aa, Artificial Sequence
  Synthetic polypeptide
SQHFGRPTELGRSLEHFSALRSCRPALLRTS

SEQ ID NO: 19637 - protein, 36 aa, Artificial Sequence
  Synthetic polypeptide
DQPGQHGETPSLLKIQKISQHFSALRSCRPALLRTS

SEQ ID NO: 19638 - protein, 11 aa, Artificial Sequence
  Synthetic polypeptide
KYKKLASISVH

SEQ ID NO: 19639 - protein, 227 aa, Artificial Sequence
  Synthetic polypeptide
PAFQCIEVMQACVAEDQLVVKWQSSALDVNTWMIEWFPDVDSEPTTLSWESVSQATNWTIQQDKLKPFWCYNISVYPMLHDKVGEPYSIQAYAKEGVPSEGPETKVENIGVKTVTITWKEIPKSERKGIICNYTIFYQAEGGKGFCKHAHSEVEKNPKPQIDAMDRPVVGMAPPSHCDLQPGMNHLASLNLSENGAKSTHLLGFWGLNESEVTVPERRVLRKWKELL

SEQ ID NO: 19640 - protein, 326 aa, Artificial Sequence
  Synthetic polypeptide
PAFQCIEVMQACVAEDQLVVKWQSSALDVNTWMIEWFPDVDSEPTTLSWESVSQATNWTIQQDKLKPFWCYNISVYPMLHDKVGEPYSIQAYAKEGVPSEGPETKVENIGVKTVTITWKEIPKSERKGIICNYTIFYQAEGGKGFSKTVNSSILQYGLESLKRKTSYIVQVMASTSAGGTNGTSINFKTLSFSVFEIILITSLIGGGLLILIILTVAYGLKKPNKLTHLCWPTVPNPAESSIATWHGDDFKDKLNLKESDDSVNTEDRILKPCSTPSDKLVIDKLVVNFGNVLQEIFTDEARTGQENNLGGEKNGTRILSSCPTSI

SEQ ID NO: 19641 - protein, 409 aa, Artificial Sequence
  Synthetic polypeptide
PAFQCIEVMQACVAEDQLVVKWQSSALDVNTWMIEWFPDVDSEPTTLSWESVSQATNWTIQQDKLKPFWCYNISVYPMLHDKVGEPYSIQAYAKEGVPSEGPETKVENIGVKTVTITWKEIPKSERKGIICNYTIFYQAEGGKGFSKTVNSSILQYGLESLKRKTSYIVQVMASTSAGGTNGTSINFKTLSFSVFEIILITSLIGGGLLILIILTVAYGLKKPNKLTHLCWPTVPNPAESSIATWHGDDFKDKLNLKESDDSVNTEDRILKPCSTPSDKLVIDKLVVNFGNVLQEIFTDEARTGQENNLGGEKNGYVTCPFRPDCPLGKSFEELPVSPEIPPRKSQYLRSRMPEGTRPEAKEQLLFSGQSLVPDHLCEEGAPNPYLKNSVTAREFLVSEKLPEHTKGEV

SEQ ID NO: 19642 - protein, 440 aa, Artificial Sequence
  Synthetic polypeptide
ETLSLGNLAESKCYLITVTPVYADGPGSPESIKAYLKQAPPSKGPTVRTKKVGKNEAVLEWDQLPVDVQNGFIRNYTIFYRTIIGNETAVNVDSSHTEYTLSSLTSDTLYMVRMAAYTDEGGKDGPEFTFTTPKFAQGEIEAIVVPVCLAFLLTTLLGVLFCFNKRDLIKKHIWPNVPDPSKSHIAQWSPHTPPRHNFNSKDQMYSDGNFTDVSVVEIEANDKKPFPEDLKSLDLFKKEKINTEGHSSGIGGSSCMSSSRPSISSSDENESSQNTSSTVQYSTVVHSGYRHQVPSVQVFSRSESTQPLLDSEERPEDLQLVDHVDGGDGILPRQQYFKQNCSQHESSPDISHFERSKQVSSVNEEDFVRLKQQISDHISQSCGSGQMKMFQEVSAADAFGPGTEGQVERFETVGMEAATDEGMPKSYLPQTVRQGGYMPQ

SEQ ID NO: 19643 - protein, 23 aa, Artificial Sequence
  Synthetic polypeptide
GDIKFGELSREQMLFDNSYSSIC

SEQ ID NO: 19644 - protein, 4 aa, Artificial Sequence
  Synthetic polypeptide
VWGT

SEQ ID NO: 19645 - protein, 22 aa, Artificial Sequence
  Synthetic polypeptide
CSSGSLTNLKGCLIGSSPISLK

SEQ ID NO: 19646 - protein, 425 aa, Artificial Sequence
  Synthetic polypeptide
MFFREPHQFKRMLNRELTHLSEMSRSGNQVSEFISNTFLDKQHEVEIPSPTQKEKEKKKRPMSQISGVKKLMHSSSLTNSSIPRFGVKTEQEDVLAKELEDVNKWGLHVFRIAELSGNRPLTVIMHTIFQERDLLKTFKIPVDTLITYLMTLEDHYHADVAYHNNIHAADVVQSTHVLLSTPALEAVFTDLEILAAIFASAIHDVDHPGVSNQFLINTNSELALMYNDSSVLENHHLAVGFKLLQEENCDIFQNLTKKQRQSLRKMVIDIVLATDMSKHMNLLADLKTMVETKKVTSSGVLLLDNYSDRIQVLQNMVHCADLSNPTKPLQLYRQWTDRIMEEFFRQGDRERERGMEISPMCDKHNASVEKSQVGFIDYIVHPLWETWADLVHPDAQDILDTLEDNREWYQSTIPQSPSPAPDDPE

SEQ ID NO: 19647 - protein, 510 aa, Artificial Sequence
  Synthetic polypeptide
MFFREPHQFKRMLNRELTHLSEMSRSGNQVSEFISNTFLDKQHEVEIPSPTQKEKEKKKRPMSQISGVKKLMHSSSLTNSSIPRFGVKTEQEDVLAKELEDVNKWGLHVFRIAELSGNRPLTVIMHTIFQERDLLKTFKIPVDTLITYLMTLEDHYHADVAYHNNIHAADVVQSTHVLLSTPALEAVFTDLEILAAIFASAIHDVDHPGVSNQFLINTNSELALMYNDSSVLENHHLAVGFKLLQEENCDIFQNLTKKQRQSLRKMVIDIVLATDMSKHMNLLADLKTMVETKKVTSSGVLLLDNYSDRIQVLQNMVHCADLSNPTKPLQLYRQWTDRIMEEFFRQGDRERERGMEISPMCDKHNASVEKSQVGFIDYIVHPLWETWADLVHPDAQDILDTLEDNREWYQSTIPQSPSPAPDDPEEGRQGQTEKFQFELTLEEDGESDTEKDSGSQVEEDTSCSDSKTLCTQDSESTEIPLDEQVEEEAVGEEEESQPEACVIDDRSPDT

SEQ ID NO: 19648 - protein, 8 aa, Artificial Sequence
  Synthetic polypeptide
VLQGASPI

SEQ ID NO: 19649 - protein, 62 aa, Artificial Sequence
  Synthetic polypeptide
ETLSSPEFLILRNCVRPLRKHYIPVMKRKTLSAEWNPILSGDFHVAIFSFPLSPSDSWNKLT

SEQ ID NO: 19650 - protein, 2 aa, Artificial Sequence
  Synthetic polypeptide
GL

SEQ ID NO: 19651 - protein, 64 aa, Artificial Sequence
  Synthetic polypeptide
KLCEASEETLHSSNEEEDPFRGMEPYLVRRLSCRNIQLPPLAFRQLEQADLKSESENIQRPTSL

SEQ ID NO: 19652 - protein, 71 aa, Artificial Sequence
  Synthetic polypeptide
KLCEASEETLHSSNEEEDPFRGMEPYLVRRLSCRNIQLPPLAFRQLEQADLKSESENIQRPTSLPLKILPL

SEQ ID NO: 19653 - protein, 738 aa, Artificial Sequence
  Synthetic polypeptide
KLCEASEETLHSSNEEEDPFRGMEPYLVRRLSCRNIQLPPLAFRQLEQADLKSESENIQRPTSLPLKILPLIAITSAESSGFDVDNGTSAGRSPLDPMTSPGSGLILQANFVHSQRRESFLYRSDSDYDLSPKSMSRNSSIASDIHGDDLIVTPFAQVLASLRTVRNNFAALTNLQDRAPSKRSPMCNQPSINKATITEEAYQKLASETLEELDWCLDQLETLQTRHSVSEMASNKFKRMLNRELTHLSEMSRSGNQVSEFISNTFLDKQHEVEIPSPTQKEKEKKKRPMSQISGVKKLMHSSSLTNSSIPRFGVKTEQEDVLAKELEDVNKWGLHVFRIAELSGNRPLTVIMHTIFQERDLLKTFKIPVDTLITYLMTLEDHYHADVAYHNNIHAADVVQSTHVLLSTPALEAVFTDLEILAAIFASAIHDVDHPGVSNQFLINTNSELALMYNDSSVLENHHLAVGFKLLQEENCDIFQNLTKKQRQSLRKMVIDIVLATDMSKHMNLLADLKTMVETKKVTSSGVLLLDNYSDRIQVLQNMVHCADLSNPTKPLQLYRQWTDRIMEEFFRQGDRERERGMEISPMCDKHNASVEKSQVGFIDYIVHPLWETWADLVHPDAQDILDTLEDNREWYQSTIPQSPSPAPDDPEEGRQGQTEKFQFELTLEEDGESDTEKDSGSQVEEDTSCSDSKTLCTQDSESTEIPLDEQVEEEAVGEEEESQPEACVIDDRSPDT

SEQ ID NO: 19654 - protein, 52 aa, Artificial Sequence
  Synthetic polypeptide
DKSTTMPLRKHYIPVMKRKTLSAEWNPILSGDFHVAIFSFPLSPSDSWNKLT

SEQ ID NO: 19655 - protein, 118 aa, Artificial Sequence
  Synthetic polypeptide
KLWLLSWLQFLFLQSLTLEAASCQLTKTLKQPMEEGHMVKYGGLQPTVSKELRQVNNHASEETLHSSNEEEDPFRGMEPYLVRRLSCRNIQLPPLAFRQLEQADLKSESENIQRPTSL

SEQ ID NO: 19656 - protein, 125 aa, Artificial Sequence
  Synthetic polypeptide
KLWLLSWLQFLFLQSLTLEAASCQLTKTLKQPMEEGHMVKYGGLQPTVSKELRQVNNHASEETLHSSNEEEDPFRGMEPYLVRRLSCRNIQLPPLAFRQLEQADLKSESENIQRPTSLPLKILPL

SEQ ID NO: 19657 - protein, 792 aa, Artificial Sequence
  Synthetic polypeptide
KLWLLSWLQFLFLQSLTLEAASCQLTKTLKQPMEEGHMVKYGGLQPTVSKELRQVNNHASEETLHSSNEEEDPFRGMEPYLVRRLSCRNIQLPPLAFRQLEQADLKSESENIQRPTSLPLKILPLIAITSAESSGFDVDNGTSAGRSPLDPMTSPGSGLILQANFVHSQRRESFLYRSDSDYDLSPKSMSRNSSIASDIHGDDLIVTPFAQVLASLRTVRNNFAALTNLQDRAPSKRSPMCNQPSINKATITEEAYQKLASETLEELDWCLDQLETLQTRHSVSEMASNKFKRMLNRELTHLSEMSRSGNQVSEFISNTFLDKQHEVEIPSPTQKEKEKKKRPMSQISGVKKLMHSSSLTNSSIPRFGVKTEQEDVLAKELEDVNKWGLHVFRIAELSGNRPLTVIMHTIFQERDLLKTFKIPVDTLITYLMTLEDHYHADVAYHNNIHAADVVQSTHVLLSTPALEAVFTDLEILAAIFASAIHDVDHPGVSNQFLINTNSELALMYNDSSVLENHHLAVGFKLLQEENCDIFQNLTKKQRQSLRKMVIDIVLATDMSKHMNLLADLKTMVETKKVTSSGVLLLDNYSDRIQVLQNMVHCADLSNPTKPLQLYRQWTDRIMEEFFRQGDRERERGMEISPMCDKHNASVEKSQVGFIDYIVHPLWETWADLVHPDAQDILDTLEDNREWYQSTIPQSPSPAPDDPEEGRQGQTEKFQFELTLEEDGESDTEKDSGSQVEEDTSCSDSKTLCTQDSESTEIPLDEQVEEEAVGEEEESQPEACVIDDRSPDT

SEQ ID NO: 19658 - protein, 38 aa, Artificial Sequence
  Synthetic polypeptide
LSTHKDTQAAYGRRPHGKIWRPPANSQQGTETSQQPCL

SEQ ID NO: 19659 - protein, 1279 aa, Artificial Sequence
  Synthetic polypeptide
GVAQACNLSTLGDRGIQEFPENIKNCKVLTIVEASVNPISKLPDGFSQLLNLTQLYLNDAFLEFLPANFGRLTKLQILELRENQLKMLPKTMNRLTQLERLDLGSNEFTEVPEVLEQLSGLKEFWMDANRLTFIPGFIGSLKQLTYLDVSKNNIEMVEEGISTCENLQDLLLSSNSLQQLPETIGSLKNITTLKIDENQLMYLPDSIGGLISVEELDCSFNEVEALPSSIGQLTNLRTFAADHNYLQQLPPEIGSWKNITVLFLHSNKLETLPEEMGDMQKLKVINLSDNRLKNLPFSFTKLQQLTAMWLSDNQSKPLIPLQKETDSETQKMVLTNYMFPQQPRTEDVMFISDNESFNPSLWEEQRKQRAQVAFECDEDKDEREAPPREGNLKRYPTPYPDELKNMVKTVQTIVHRLKDEETNEDSGRDLKPHEDQQDINKDTSESTTTVKSKVDEREKYMIGNSVQKISEPEAEISPGSLPVTANMKASENLKHIVNHDDVFEESEELSSDEEMKMAEMRPPLIETSINQPKVVALSNNKKDDTKETDSLSDEVTHNSNQNNSNCSSPSRMSDSVSLNTDSSQDTSLCSPVKQTHIDINSKIRQEDENFNSLLQNGDILNSSTEEKFKAHDKKDFNLPEYDLNVEERLVLIEKSVDSTATADDTHKLDHINMNLNKLITNDTFQPEIMERSKTQDIVLGTSFLSINSKEETEHLENGNKYPNLESVNKVNGHSEETSQSPNRTEPHDSDCSVDLGISKSTEDLSPQKSGPVGSVVKSHSITNMEIGGLKIYDILSDNGPQQPSTTVKITSAVDGKNIVRSKSATLLYDQPLQVFTGSSSSSDLISGTKAIFKFDSNHNPEEPNIIRGPTSGPQSAPQIYGPPQYNIQYSSSAAVKDTLWHSKQNPQIDHASFPPQLLPRSESTENQSYAKHSANMNFSNHNNVRANTAYHLHQRLGPARHGEMWAISPNDRLIPAVTRSTIQRQSSVSSTASVNLGDPGSTRRAQIPEGDYLSYREFHSAGRTPPMMPGSQRPLSARTYSIDGPNASRPQSARPSINEIPERTMSVSDFNYSRTSPSKRPNARVGSEHSLLDPPGKSKVPRDWREQVLRHIEAKKLEKMPLSNGQMGQPLRPQANYSQIHHPPQASVARHPSREQLIDYLMLKVAHQPPYTQPHCSPRQGHELAKQEIRVRVEKDPELGFSISGGVGGRGNPFRPDDDGIFVTRVQPEGPASKLLQPGDKIIQANGYSFINIEHGQAVSLLKTFQNTVELIIVREVSS

SEQ ID NO: 19660 - protein, 1214 aa, Artificial Sequence
  Synthetic polypeptide
GVAQACNLSTLGDRGIQEFPENIKNCKVLTIVEASVNPISKLPDGFSQLLNLTQLYLNDAFLEFLPANFGRLTKLQILELRENQLKMLPKTMNRLTQLERLDLGSNEFTEVPEVLEQLSGLKEFWMDANRLTFIPGFIGSLKQLTYLDVSKNNIEMVEEGISTCENLQDLLLSSNSLQQLPETIGSLKNITTLKIDENQLMYLPDSIGGLISVEELDCSFNEVEALPSSIGQLTNLRTFAADHNYLQQLPPEIGSWKNITVLFLHSNKLETLPEEMGDMQKLKVINLSDNRLKNLPFSFTKLQQLTAMWLSDNQSKPLIPLQKETDSETQKMVLTNYMFPQQPRTEDVMFISDNESFNPSLWEEQRKQRAQVAFECDEDKDEREAPPREGNLKRYPTPYPDELKNMVKTVQTIVHRLKDEETNEDSGRDLKPHEDQQDINKDVGVKTSESTTTVKSKVDEREKYMIGNSVQKISEPEAEISPGSLPVTANMKASENLKHIVNHDDVFEESEELSSDEEMKMAEMRPPLIETSINQPKVVALSNNKKDDTKETDSLSDEVTHNSNQNNSNCSSPSRMSDSVSLNTDSSQDTSLCSPVKQTHIDINSKIRQEDENFNSLLQNGDILNSSTEEKFKAHDKKDFNLPEYDLNVEERLVLIEKSVDSTATADDTHKLDHINMNLNKLITNDTFQPEIMERSKTQDIVLGTSFLSINSKEETEHLENGNKYPNLESVNKVNGHSEETSQSPNRTEPHDSDCSVDLGISKSTEDLSPQKSGPVGSVVKSHSITNMEIGGLKIYDILSDNGPQQPSTTVKITSAVDGKNIVRSKSATLLYDQPLQVFTGSSSSSDLISGTKAIFKFDSNHNPEEPNIIRGPTSGPQSAPQIYGPPQYNIQYSSSAAVKDTLWHSKQNPQIDHASFPPQLLPRSESTENQSYAKHSANMNFSNHNNVRANTAYHLHQRLGPARHGEMWAISPNDRLIPAVTRSTIQRQSSVSSTASVNLGDPGSTRRAQIPEGDYLSYREFHSAGRTPPMMPGSQRPLSARTYSIDGPNASRPQSARPSINEIPERTMSVSDFNYSRTSPSKRPNARVGSEHSLLDPPGKSKVPRDWREQVLRHIEAKKLEKIRVRVEKDPELGFSISGGVGGRGNPFRPDDDGIFVTRVQPEGPASKLLQPGDKIIQANGYSFINIEHGQAVSLLKTFQNTVELIIVREVSS

SEQ ID NO: 19661 - protein, 1324 aa, Artificial Sequence
  Synthetic polypeptide
GVAQACNLSTLGDRGIQEFPENIKNCKVLTIVEASVNPISKLPDGFSQLLNLTQLYLNDAFLEFLPANFGRLTKLQILELRENQLKMLPKTMNRLTQLERLDLGSNEFTEVPEVLEQLSGLKEFWMDANRLTFIPGFIGSLKQLTYLDVSKNNIEMVEEGISTCENLQDLLLSSNSLQQLPETIGSLKNITTLKIDENQLMYLPDSIGGLISVEELDCSFNEVEALPSSIGQLTNLRTFAADHNYLQQLPPEIGSWKNITVLFLHSNKLETLPEEMGDMQKLKVINLSDNRLKNLPFSFTKLQQLTAMWLSDNQSKPLIPLQKETDSETQKMVLTNYMFPQQPRTEDVMFISDNESFNPSLWEEQRKQRAQVAFECDEDKDEREAPPREGNLKRYPTPYPDELKNMVKTVQTIVHRLKDEETNEDSGRDLKPHEDQQDINKDVGVKTSESTTTVKSKVDEREKYMIGNSVQKISEPEAEISPGSLPVTANMKASENLKHIVNHDDVFEESEELSSDEEMKMAEMRPPLIETSINQPKVVALSNNKKDDTKETDSLSDEVTHNSNQNNSNCSSPSRMSDSVSLNTDSSQDTSLCSPVKQTHIDINSKIRQEDENFNSLLQNGDILNSSTEEKFKAHDKKDFNLPEYDLNVEERLVLIEKSVDSTATADDTHKLDHINMNLNKLITNDTFQPEIMERSKTQDIVLGTSFLSINSKEETEHLENGNKYPNLESVNKVNGHSEETSQSPNRTEPHDSDCSVDLGISKSTEDLSPQKSGPVGSVVKSHSITNMEIGGLKIYDILSDNGPQQPSTTVKITSAVDGKNIVRSKSATLLYDQPLQVFTGSSSSSDLISGTKAIFKFDSNHNPEEPNIIRGPTSGPQSAPQIYGPPQYNIQYSSSAAVKDTLWHSKQNPQIDHASFPPQLLPRSESTENQSYAKHSANMNFSNHNNVRANTAYHLHQRLGPARHGEMWAISPNDRLIPAVTRSTIQRQSSVSSTASVNLGDPGSTRRAQIPEGDYLSYREFHSAGRTPPMMPGSQRPLSARTYSIDGPNASRPQSARPSINEIPERTMSVSDFNYSRTSPSKRPNARVGSEHSLLDPPGKSKVPRDWREQVLRHIEAKKLEKKHPQTSSSGDPCQDGIFISGQQNYSSATLSHKDVPPDSLMKMPLSNGQMGQPLRPQANYSQIHHPPQASVARHPSREQLIDYLMLKVAHQPPYTQPHCSPRQGHELAKQEIRVRVEKDPELGFSISGGVGGRGNPFRPDDDGIFVTRVQPEGPASKLLQPGDKIIQANGYSFINIEHGQAVSLLKTFQNTVELIIVREVSS

SEQ ID NO: 19662 - protein, 1252 aa, Artificial Sequence
  Synthetic polypeptide
GVAQACNLSTLGDRGIQEFPENIKNCKVLTIVEASVNPISKLPDGFSQLLNLTQLYLNDAFLEFLPANFGRLTKLQILELRENQLKMLPKTMNRLTQLERLDLGSNEFTEVPEVLEQLSGLKEFWMDANRLTFIPGFIGSLKQLTYLDVSKNNIEMVEEGISTCENLQDLLLSSNSLQQLPETIGSLKNITTLKIDENQLMYLPDSIGGLISVEELDCSFNEVEALPSSIGQLTNLRTFAADHNYLQQLPPEIGSWKNITVLFLHSNKLETLPEEMGDMQKLKVINLSDNRLKNLPFSFTKLQQLTAMWLSDNQSKPLIPLQKETDSETQKMVLTNYMFPQQPRTEDVMFISDNESFNPSLWEEQRKQRAQVAFECDEDKDEREAPPREGNLKRYPTPYPDELKNMVKTVQTIVHRLKDEETNEDSGRDLKPHEDQQDINKDVGVKTSESTTTVKSKVDEREKYMIGNSVQKISEPEAEISPGSLPVTANMKASENLKHIVNHDDVFEESEELSSDEEMKMAEMRPPLIETSINQPKVVALSNNKKDDTKETDSLSDEVTHNSNQNNSNCSSPSRMSDSVSLNTDSSQDTSLCSPVKQTHIDINSKIRQEDENFNSLLQNGDILNSSTEEKFKAHDKKDFNLPEYDLNVEERLVLIEKSVDSTATADDTHKLDHINMNLNKLITNDTFQPEIMERSKTQDIVLGTSFLSINSKEETEHLENGNKYPNLESVNKVNGHSEETSQSPNRTEPHDSDCSVDLGISKSTEDLSPQKSGPVGSVVKSHSITNMEIGGLKIYDILSDNGPQQPSTTVKITSAVDGKNIVRSKSATLLYDQPLQVFTGSSSSSDLISGTKAIFKFDSNHNPEEPNIIRGPTSGPQSAPQIYGPPQYNIQYSSSAAVKDTLWHSKQNPQIDHASFPPQLLPRSESTENQSYAKHSANMNFSNHNNVRANTAYHLHQRLGPARHGEMWAISPNDRLIPAVTRSTIQRQSSVSSTASVNLGDPGSTRRAQIPEGDYLSYREFHSAGRTPPMMPGSQRPLSARTYSIDGPNASRPQSARPSINEIPERTMSVSDFNYSRTSPSKRPNARVGSEHSLLDPPGKSKVPRDWREQVLRHIEAKKLEKMPLSNGQMGQPLRPQANYSQIHHPPQASVARHPSREQLIDYLMLKVAHQPPYTQPHCSPRQGHELAKQEGIFVTRVQPEGPASKLLQPGDKIIQANGYSFINIEHGQAVSLLKTFQNTVELIIVREVSS

SEQ ID NO: 19663 - protein, 1258 aa, Artificial Sequence
  Synthetic polypeptide
GVAQACNLSTLGDRGIQEFPENIKNCKVLTIVEASVNPISKLPDGFSQLLNLTQLYLNDAFLEFLPANFGRLTKLQILELRENQLKMLPKTMNRLTQLERLDLGSNEFTEVPEVLEQLSGLKEFWMDANRLTFIPGFIGSLKQLTYLDVSKNNIEMVEEGISTCENLQDLLLSSNSLQQLPETIGSLKNITTLKIDENQLMYLPDSIGGLISVEELDCSFNEVEALPSSIGQLTNLRTFAADHNYLQQLPPEIGSWKNITVLFLHSNKLETLPEEMGDMQKLKVINLSDNRLKNLPFSFTKLQQLTAMWLSDNQSKPLIPLQKETDSETQKMVLTNYMFPQQPRTEDVMFISDNESFNPSLWEEQRKQRAQVAFECDEDKDEREAPPREGNLKRYPTPYPDELKNMVKTVQTIVHRLKDEETNEDSGRDLKPHEDQQDINKDVGVKTSESTTTVKSKVDEREKYMIGNSVQKISEPEAEISPGSLPVTANMKASENLKHIVNHDDVFEESEELSSDEEMKMAEMRPPLIETSINQPKVVALSNNKKDDTKETDSLSDEVTHNSNQNNSNCSSPSRMSDSVSLNTDSSQDTSLCSPVKQTHIDINSKIRQEDENFNSLLQNGDILNSSTEEKFKAHDKKDFNLPEYDLNVEERLVLIEKSVDSTATADDTHKLDHINMNLNKLITNDTFQPEIMERSKTQDIVLGTSFLSINSKEETEHLENGNKYPNLESVNKVNGHSEETSQSPNRTEPHDSDCSVDLGISKSTEDLSPQKSGPVGSVVKSHSITNMEIGGLKIYDILSDNGPQQPSTTVKITSAVDGKNIVRSKSATLLYDQPLQVFTGSSSSSDLISGTKAIFKFDSNHNPEEPNIIRGPTSGPQSAPQIYGPPQYNIQYSSSAAVKDTLWHSKQNPQIDHASFPPQLLPRSESTENQSYAKHSANMNFSNHNNVRANTAYHLHQRLGPARHGEMWAISPNDRLIPAVTRSTIQRQSSVSSTASVNLGDPGSTRRAQIPEGDYLSYREFHSAGRTPPMMPGSQRPLSARTYSIDGPNASRPQSARPSINEIPERTMSVSDFNYSRTSPSKRPNARVGSEHSLLDPPGKSKVPRDWREQVLRHIEAKKLEKMPLSNGQMGQPLRPQANYSQIHHPPQASVARHPSREQLIDYLMLKVAHQPPYTQPHCSPRQGHELAKQEIRVRVEKDPELGFSISGGVGGRGNPFRPDDDANGYSFINIEHGQAVSLLKTFQNTVELIIVREVSS

SEQ ID NO: 19664 - protein, 1283 aa, Artificial Sequence
  Synthetic polypeptide
GVAQACNLSTLGDRGIQEFPENIKNCKVLTIVEASVNPISKLPDGFSQLLNLTQLYLNDAFLEFLPANFGRLTKLQILELRENQLKMLPKTMNRLTQLERLDLGSNEFTEVPEVLEQLSGLKEFWMDANRLTFIPGFIGSLKQLTYLDVSKNNIEMVEEGISTCENLQDLLLSSNSLQQLPETIGSLKNITTLKIDENQLMYLPDSIGGLISVEELDCSFNEVEALPSSIGQLTNLRTFAADHNYLQQLPPEIGSWKNITVLFLHSNKLETLPEEMGDMQKLKVINLSDNRLKNLPFSFTKLQQLTAMWLSDNQSKPLIPLQKETDSETQKMVLTNYMFPQQPRTEDVMFISDNESFNPSLWEEQRKQRAQVAFECDEDKDEREAPPREGNLKRYPTPYPDELKNMVKTVQTIVHRLKDEETNEDSGRDLKPHEDQQDINKDVGVKTSESTTTVKSKVDEREKYMIGNSVQKISEPEAEISPGSLPVTANMKASENLKHIVNHDDVFEESEELSSDEEMKMAEMRPPLIETSINQPKVVALSNNKKDDTKETDSLSDEVTHNSNQNNSNCSSPSRMSDSVSLNTDSSQDTSLCSPVKQTHIDINSKIRQEDENFNSLLQNGDILNSSTEEKFKAHDKKDFNLPEYDLNVEERLVLIEKSVDSTATADDTHKLDHINMNLNKLITNDTFQPEIMERSKTQDIVLGTSFLSINSKEETEHLENGNKYPNLESVNKVNGHSEETSQSPNRTEPHDSDCSVDLGISKSTEDLSPQKSGPVGSVVKSHSITNMEIGGLKIYDILSDNGPQQPSTTVKITSAVDGKNIVRSKSATLLYDQPLQVFTGSSSSSDLISGTKAIFKFDSNHNPEEPNIIRGPTSGPQSAPQIYGPPQYNIQYSSSAAVKDTLWHSKQNPQIDHASFPPQLLPRSESTENQSYAKHSANMNFSNHNNVRANTAYHLHQRLGPARHGEMWAISPNDRLIPAVTRSTIQRQSSVSSTASVNLGDPGSTRRAQIPEGDYLSYREFHSAGRTPPMMPGSQRPLSARTYSIDGPNASRPQSARPSINEIPERTMSVSDFNYSRTSPSKRPNARVGSEHSLLDPPGKSKVPRDWREQVLRHIEAKKLEKMPLSNGQMGQPLRPQANYSQIHHPPQASVARHPSREQLIDYLMLKVAHQPPYTQPHCSPRQGHELAKQEIRVRVEKDPELGFSISGGVGGRGNPFRPDDDGIFVTRVQPEGPASKLLQPGDKIIQANGYSFINIEHGQAVSLLKTFQNTVELIIVREVSS

SEQ ID NO: 19665 - protein, 1272 aa, Artificial Sequence
  Synthetic polypeptide
GVAQACNLSTLGDRGIQEFPENIKNCKVLTIVEASVNPISKLPDGFSQLLNLTQLYLNDAFLEFLPANFGRLTKLQILELRENQLKMLPKTMNRLTQLERLDLGSNEFTEVPEVLEQLSGLKEFWMDANRLTFIPGFIGSLKQLTYLDVSKNNIEMVEEGISTCENLQDLLLSSNSLQQLPETIGSLKNITTLKIDENQLMYLPDSIGGLISVEELDCSFNEVEALPSSIGQLTNLRTFAADHNYLQQLPPEIGSWKNITVLFLHSNKLETLPEEMGDMQKLKVINLSDNRLKNLPFSFTKLQQLTAMWLSDNQSKPLIPLQKETDSETQKMVLTNYMFPQQPRTEDVMFISDNESFNPSLWEEQRKQRAQVAFECDEDKDEREAPPREGNLKRYPTPYPDELKNMVKTVQTIVHRLKDEETNEDSGRDLKPHEDQQDINKDVGVKTSESTTTVKSKVDEREKYMIGNSVQKISEPEAEISPGSLPVTANMKASENLKHIVNHDDVFEESEELSSDEEMKMAEMRPPLIETSINQPKVVALSNNKKDDTKETDSLSDEVTHNSNQNNSNCSSPSRMSDSVSLNTDSSQDTSLCSPVKQTHIDINSKIRQEDENFNSLLQNGDILNSSTEEKFKAHDKKDFNLPEYDLNVEERLVLIEKSVDSTATADDTHKLDHINMNLNKLITNDTFQPEIMERSKTQDIVLGTSFLSINSKEETEHLENGNKYPNLESVNKVNGHSEETSQSPNRTEPHDSDCSVDLGISKSTEDLSPQKSGPVGSVVKSHSITNMEIGGLKIYDILSDNGPQQPSTTVKITSAVDGKNIVRSKSATLLYDQPLQVFTGSSSSSDLISGTKAIFKFDSNHNPEEPNIIRGPTSGPQSAPQIYGPPQYNIQYSSSAAVKDTLWHSKQNPQIDHASFPPQLLPRSESTENQSYAKHSANMNFSNHNNVRANTAYHLHQRLGPARHGEMWAISPNDRLIPAVTRSTIQRQSSVSSTASVNLGDPGSTRRAQIPEGDYLSYREFHSAGRTPPMMPGSQRPLSARTYSIDGPNASRPQSARPSINEIPERTMSVSDFNYSRTSPSKRPNARVGSEHSLLDPPGKSKVPRDWREQVLRHIEAKKLEKMPLSNGQMGQPLRPQASVARHPSREQLIDYLMLKVAHQPPYTQPHCSPRQGHELAKQEIRVRVEKDPELGFSISGGVGGRGNPFRPDDDGIFVTRVQPEGPASKLLQPGDKIIQANGYSFINIEHGQAVSLLKTFQNTVELIIVREVSS

SEQ ID NO: 19666 - protein, 1331 aa, Artificial Sequence
  Synthetic polypeptide
GVAQACNLSTLGDRGIQEFPENIKNCKVLTIVEASVNPISKLPDGFSQLLNLTQLYLNDAFLEFLPANFGRLTKLQILELRENQLKMLPKTMNRLTQLERLDLGSNEFTEVPEVLEQLSGLKEFWMDANRLTFIPGFIGSLKQLTYLDVSKNNIEMVEEGISTCENLQDLLLSSNSLQQLPETIGSLKNITTLKIDENQLMYLPDSIGGLISVEELDCSFNEVEALPSSIGQLTNLRTFAADHNYLQQLPPEIGSWKNITVLFLHSNKLETLPEEMGDMQKLKVINLSDNRLKNLPFSFTKLQQLTAMWLSDNQSKPLIPLQKETDSETQKMVLTNYMFPQQPRTEDVMFISDNESFNPSLWEEQRKQRAQVAFECDEDKDEREAPPREGNLKRYPTPYPDELKNMVKTVQTIVHRLKDEETNEDSGRDLKPHEDQQDINKDVGVKTSESTTTVKSKVDEREKYMIGNSVQKISEPEAEISPGSLPVTANMKASENLKHIVNHDDVFEESEELSSDEEMKMAEMRPPLIETSINQPKVVALSNNKKDDTKETDSLSDEVTHNSNQNNSNCSSPSRMSDSVSLNTDSSQDTSLCSPVKQTHIDINSKIRQEDENFNSLLQNGDILNSSTEEKFKAHDKKDFNLPEYDLNVEERLVLIEKSVDSTATADDTHKLDHINMNLNKLITNDTFQPEIMERSKTQDIVLGTSFLSINSKEETEHLENGNKYPNLESVNKVNGHSEETSQSPNRTEPHDSDCSVDLGISKSTEDLSPQKSGPVGSVVKSHSITNMEIGGLKIYDILSDNGPQQPSTTVKITSAVDGKNIVRSKSATLLYDQPLQVFTGSSSSSDLISGTKAIFKFDSNHNPEEPNIIRGPTSGPQSAPQIYGPPQYNIQYSSSAAVKDTLWHSKQNPQIDHASFPPQLLPRSESTENQSYAKHSANMNFSNHNNVRANTAYHLHQRLGPARHGEMWAISPNDRLIPAVTRSTIQRQSSVSSTASVNLGDPGSTRRAQIPEGDYLSYREFHSAGRTPPMMPGSQRPLSARTYSIDGPNASRPQSARPSINEIPERTMSVSDFNYSRTSPSKRPNARVGSEHSLLDPPGKSKVPRDWREQVLRHIEAKKLEKSMLSRSFNSNFTTVSSFHCGSSRDLHGSQGSLALSVADRRGSGGHIFRMPLSNGQMGQPLRPQANYSQIHHPPQASVARHPSREQLIDYLMLKVAHQPPYTQPHCSPRQGHELAKQEIRVRVEKDPELGFSISGGVGGRGNPFRPDDDGIFVTRVQPEGPASKLLQPGDKIIQANGYSFINIEHGQAVSLLKTFQNTVELIIVREVSS

SEQ ID NO: 19667 - protein, 522 aa, Artificial Sequence
  Synthetic polypeptide
GVAQACNLSTLGDRGIQEFPENIKNCKVLTIVEASVNPISKLPDGFSQLLNLTQLYLNDAFLEFLPANFGRLTKLQILELRENQLKMLPKTMNRLTQLERLDLGSNEFTEVPEVLEQLSGLKEFWMDANRLTFIPGFIGSLKQLTYLDVSKNNIEMVEEGISTCENLQDLLLSSNSLQQLPETIGSLKNITTLKIDENQLMYLPDSIGGLISVEELDCSFNEVEALPSSIGQLTNLRTFAADHNYLQQLPPEIGSWKNITVLFLHSNKLETLPEEMGDMQKLKVINLSDNRLKNLPFSFTKLQQLTAMWLSDNQSMLSRSFNSNFTTVSSFHCGSSRDLHGSQGSLALSVADRRGSGGHIFRMPLSNGQMGQPLRPQANYSQIHHPPQASVARHPSREQLIDYLMLKVAHQPPYTQPHCSPRQGHELAKQEIRVRVEKDPELGFSISGGVGGRGNPFRPDDDGIFVTRVQPEGPASKLLQPGDKIIQANGYSFINIEHGQAVSLLKTFQNTVELIIVREVSS

SEQ ID NO: 19668 - protein, 19 aa, Artificial Sequence
  Synthetic polypeptide
SQHFGRSRNTGVSRKYKKL

SEQ ID NO: 19669 - protein, 23 aa, Artificial Sequence
  Synthetic polypeptide
VGWLKPVISALWEIEEYRSFQKI

SEQ ID NO: 19670 - protein, 34 aa, Artificial Sequence
  Synthetic polypeptide
ASQVLPRSQADASTVLPVEPAEQKKPTKHITVKI

SEQ ID NO: 19671 - protein, 688 aa, Artificial Sequence
  Synthetic polypeptide
DLVIEKSGTSSVILSLLLSPCSVPAPRLPSAMIVSVSSPPQKPSRCQHCASCRACRAKEANKTYNCENLGLSEIPDTLPNTTEFLEFSFNFLPTIHNRTFSRLMNLTFLDLTRCQINWIHEDTFQSHHQLSTLVLTGNPLIFMAETSLNGPKSLKHLFLIQTGISNLEFIPVHNLENLESLYLGSNHISSIKFPKDFPARNLKVLDFQNNAIHYISREDMRSLEQAINLSLNFNGNNVKGIELGAFDSTIFQSLNFGGTPNLSVIFNGLQNSTTQSLWLGTFEDIDDEDISSAMLKGLCEMSVESLNLQEHRFSDISSTTFQCFTQLQELDLTATHLKGLPSGMKGLNLLKKLVLSVNHFDQLCQISAANFPSLTHLYIRGNVKKLHLGVGCLEKLGNLQTLDLSHNDIEASDCCSLQLKNLSHLQTLNLSHNEPLGLQSQAFKECPQLELLDLAFTRLHINAPQSPFQNLHFLQVLNLTYCFLDTSNQHLLAGLPVLRHLNLKGNHFQDGTITKTNLLQTVGSLEVLILSSCGLLSIDQQAFHSLGKMSHVDLSHNSLTCDSIDSLSHLKGIYLNLAANSINIISPRLLPILSQQSTINLSHNPLDCTCSNIHFLTWYKENLHKLEGSEETTCANPPSLRGVKLSDVKLSCGITAIGIFFLIVFLLLLAILLFFAVKYLLRWKYQHI

SEQ ID NO: 19672 - protein, 11 aa, Artificial Sequence
  Synthetic polypeptide
SLQSKRSQQNI

SEQ ID NO: 19673 - protein, 46 aa, Artificial Sequence
  Synthetic polypeptide
EAEAGGSLEASSEISRTWWRAPFCGPRIKSNKCHLRSPVISSQEPQ

SEQ ID NO: 19674 - protein, 20 aa, Artificial Sequence
  Synthetic polypeptide
PDMVARAFLWSQNQKQQMPP

SEQ ID NO: 19675 - protein, 427 aa, Artificial Sequence
  Synthetic polypeptide
SPHFRRLRQEDRLRPAVKLAGHGGARLSVVPESKATNATLDPRSFLLRNPNDKYEPFWEDEEKNESGLTEYRLVSINKSSPLQKQLPAFISEDASGYLTSSWLTLFVPSVYTGVFVVSLPLNIMAIVVFILKMKVKKPAVVYMLHLATADVLFVSVLPFKISYYFSGSDWQFGSELCRFVTAAFYCNMYASILLMTVISIDRFLAVVYPMQSLSWRTLGRASFTCLAIWALAIAGVVPLLLKEQTIQVPGLNITTCHDVLNETLLEGYYAYYFSAFSAVFFFVPLIISTVCYVSIIRCLSSSAVANRSKKSRALFLSAAVFCIFIICFGPTNVLLIAHYSFLSHTSTTEAAYFAYLLCVCVSSISCCIDPLIYYYASSECQRYVYSILCCKESSDPSSYNSSGQLMASKMDTCSSNLNNSIYKKLLT

SEQ ID NO: 19676 - protein, 30 aa, Artificial Sequence
  Synthetic polypeptide
EGRRPSARQPPRLRSEEPFHPAVTPSGTNQ

SEQ ID NO: 19677 - protein, 57 aa, Artificial Sequence
  Synthetic polypeptide
GALPPGSHPVWDEPVDPLKEEALLVRLMAHPTSLEKELQLKQSFLWMSFLHLSSLEN

SEQ ID NO: 19678 - protein, 446 aa, Artificial Sequence
  Synthetic polypeptide
GASLPGRPSSEMWGAPLPHRPVWDVRSASARPRPRLGGEERLCPAAPSEKGGDPPPGNRPVSEVRSPSTRQSPRLGRTSRSSKGRSLIGKVDGTSHVTGKGVTVETVFSVDEFSASVLTGKLTTVFLPIVYTIVFVVGLPSNGMALWVFLFRTKKKHPAVIYMANLALADLLSVIWFPLKIAYHIHGNNWIYGEALCNVLIGFFYGNMYCSILFMTCLSVQRYWVIVNPMGHSRKKANIAIGISLAIWLLILLVTIPLYVVKQTIFIPALNITTCHDVLPEQLLVGDMFNYFLSLAIGVFLFPAFLTASAYVLMIRMLRSSAMDENSEKKRKRAIKLIVTVLAMYLICFTPSNLLLVVHYFLIKSQGQSHVYALYIVALCLSTLNSCIDPFVYYFVSHDFRDHAKNALLCRSVRTVKQMQVSLTSKKHSRKSSSYSSSSTTVKTSY

SEQ ID NO: 19679 - protein, 29 aa, Artificial Sequence
  Synthetic polypeptide
GALPPGSHPVWDVRSVSARQPPRPGGRNQ

SEQ ID NO: 19680 - protein, 136 aa, Artificial Sequence; identical to SEQ ID NO: 3200
  Synthetic polypeptide

SEQ ID NO: 19681 - protein, 383 aa, Artificial Sequence; identical to SEQ ID NO: 2278
  Synthetic polypeptide

SEQ ID NO: 19682 - protein, 92 aa, Artificial Sequence; identical to SEQ ID NO: 3721
  Synthetic polypeptide

SEQ ID NO: 19683 - protein, 872 aa, Artificial Sequence; identical to SEQ ID NO: 1601
  Synthetic polypeptide

SEQ ID NO: 19684 - protein, 23 aa, Artificial Sequence
  Synthetic polypeptide
GFPSHVELSGFCSPCCRPTSPWR

SEQ ID NO: 19685 - protein, 31 aa, Artificial Sequence
  Synthetic polypeptide
DVPCFPFTFCHDCKFPEASPAMQNLPFTSCH

SEQ ID NO: 19686 - protein, 47 aa, Artificial Sequence
  Synthetic polypeptide
EWQFLLHALSLLLPCKMCLASPSPSAMIVSFLRPPQPCRTCLSPPAM

SEQ ID NO: 19687 - protein, 14 aa, Artificial Sequence
  Synthetic polypeptide
GLPSHAELAFHLLP

SEQ ID NO: 19688 - protein, 27 aa, Artificial Sequence
  Synthetic polypeptide
CSNCPAESSHHRTSPIHSSHVPFTSCH

SEQ ID NO: 19689 - protein, 36 aa, Artificial Sequence
  Synthetic polypeptide
GHHYNSTVNAATAQLSLPIIGRPQSIPAMCLSPPAM

SEQ ID NO: 19690 - protein, 20 aa, Artificial Sequence
  Synthetic polypeptide
VFPSSDVPNPFQPCAFHLLP

SEQ ID NO: 19691 - protein, 28 aa, Artificial Sequence
  Synthetic polypeptide
CSNCPAESSHHRTSPIHSSHEVPFTSCH

SEQ ID NO: 19692 - protein, 37 aa, Artificial Sequence; identical to SEQ ID NO: 6017
  Synthetic polypeptide

SEQ ID NO: 19693 - protein, 34 aa, Artificial Sequence; identical to SEQ ID NO: 6200
  Synthetic polypeptide

SEQ ID NO: 19694 - protein, 65 aa, Artificial Sequence; identical to SEQ ID NO: 4429
  Synthetic polypeptide

SEQ ID NO: 19695 - protein, 25 aa, Artificial Sequence
  Synthetic polypeptide
CSNCPAESSHHRTSPIHSSHETINA

SEQ ID NO: 19696 - protein, 34 aa, Artificial Sequence
  Synthetic polypeptide
GHHYNSTVNAATAQLSLPIIGRPQSIPAMKLSML

SEQ ID NO: 19697 - protein, 75 aa, Artificial Sequence
  Synthetic polypeptide
MRPKENSNGEFLRRVSPALKKETRKSKFLLPPLLQPTFDHMVVWALGNCSYRGLKSGEREVGLLMRLIGFSSPGI

SEQ ID NO: 19698 - protein, 1034 aa, Artificial Sequence
  Synthetic polypeptide
RTEEWRERSWALDEADRLQLPRNMIENSMFEEEPDVVDLAKEPCLHPLEPDEVEYEPRGSRLLVRGLGEHEMEEDEEDYESSAKLLGMSFMNRSSGLRNSATGYRQSPDGACSVPSARTMVVCAFVIVVAVSVIMVIYLLPRCTFTKEGCHKKNQSIGLIQPFATNGKLFPWAQIRLPTAVVPLRYELSLHPNLTSMTFRGSVTISVQALQVTWNIILHSTGHNISRVTFMSAVSSQEKQAEILEYAYHGQIAIVAPEALLAGHNYTLKIEYSANISSSYYGFYGFSYTDESNEKKYFAATQFEPLAARSAFPCFDEPAFKATFIIKIIRDEQYTALSNMPKKSSVVLDDGLVQDEFSESVKMSTYLVAFIVGEMKNLSQDVNGTLVSIYAVPEKIGQVHYALETTVKLLEFFQNYFEIQYPLKKLDLVAIPDFEAGAMENWGLLTFREETLLYDSNTSSMADRKLVTKIIAHELAHQWFGNLVTMKWWNDLWLNEGFATFMEYFSLEKIFKELSSYEDFLDARFKTMKKDSLNSSHPISSSVQSSEQIEEMFDSLSYFKGSSLLLMLKTYLSEDVFQHAVVLYLHNHSYASIQSDDLWDSFNEVTNQTLDVKRMMKTWTLQKGFPLVTVQKKGKELFIQQERFFLNMKPEIQPSDTSYLWHIPLSYVTEGRNYSKYQSVSLLDKKSGVINLTEEVLWVKVNINMNGYYIVHYADDDWEALIHQLKINPYVLSDKDRANLINNIFELAGLGKVPLKRAFDLINYLGNENHTAPITEALFQTDLIYNLLEKLGYMDLASRLVTRVFKLLQNQIQQQTWTDEGTPSMRELRSALLEFACTHNLGNCSTTAMKLFDDWMASNGTQSLPTDVMTTVFKVGAKTDKGWSFLLGKYISIGSEAEKNKILEALASSEDVRKLYWLMKSSLNGDNFRTQKLSFIIRTVGRHFPGHLLAWDFVKENWNKLVQKFPLGSYTIQNIVAGSTYLFSTKTHLSEVQAFFENQSEATFRLRCVQEALEVIQLNIQWMEKNLKSLTWWL

SEQ ID NO: 19699 - protein, 10 aa, Artificial Sequence
  Synthetic polypeptide
ISASAPQEYD

SEQ ID NO: 19700 - protein, 23 aa, Artificial Sequence
  Synthetic polypeptide
LKIILSVDLLYEMINIGFSSPGI

SEQ ID NO: 19701 - protein, 1022 aa, Artificial Sequence
  Synthetic polypeptide
NDKYRLQLPRNMIENSMFEEEPDVVDLAKEPCLHPLEPDEVEYEPRGSRLLVRGLGEHEMEEDEEDYESSAKLLGMSFMNRSSGLRNSATGYRQSPDGACSVPSARTMVVCAFVIVVAVSVIMVIYLLPRCTFTKEGCHKKNQSIGLIQPFATNGKLFPWAQIRLPTAVVPLRYELSLHPNLTSMTFRGSVTISVQALQVTWNIILHSTGHNISRVTFMSAVSSQEKQAEILEYAYHGQIAIVAPEALLAGHNYTLKIEYSANISSSYYGFYGFSYTDESNEKKYFAATQFEPLAARSAFPCFDEPAFKATFIIKIIRDEQYTALSNMPKKSSVVLDDGLVQDEFSESVKMSTYLVAFIVGEMKNLSQDVNGTLVSIYAVPEKIGQVHYALETTVKLLEFFQNYFEIQYPLKKLDLVAIPDFEAGAMENWGLLTFREETLLYDSNTSSMADRKLVTKIIAHELAHQWFGNLVTMKWWNDLWLNEGFATFMEYFSLEKIFKELSSYEDFLDARFKTMKKDSLNSSHPISSSVQSSEQIEEMFDSLSYFKGSSLLLMLKTYLSEDVFQHAVVLYLHNHSYASIQSDDLWDSFNEVTNQTLDVKRMMKTWTLQKGFPLVTVQKKGKELFIQQERFFLNMKPEIQPSDTSYLWHIPLSYVTEGRNYSKYQSVSLLDKKSGVINLTEEVLWVKVNINMNGYYIVHYADDDWEALIHQLKINPYVLSDKDRANLINNIFELAGLGKVPLKRAFDLINYLGNENHTAPITEALFQTDLIYNLLEKLGYMDLASRLVTRVFKLLQNQIQQQTWTDEGTPSMRELRSALLEFACTHNLGNCSTTAMKLFDDWMASNGTQSLPTDVMTTVFKVGAKTDKGWSFLLGKYISIGSEAEKNKILEALASSEDVRKLYWLMKSSLNGDNFRTQKLSFIIRTVGRHFPGHLLAWDFVKENWNKLVQKFPLGSYTIQNIVAGSTYLFSTKTHLSEVQAFFENQSEATFRLRCVQEALEVIQLNIQWMEKNLKSLTWWL

SEQ ID NO: 19702 - protein, 10 aa, Artificial Sequence
  Synthetic polypeptide
AAIPVYQNRE

SEQ ID NO: 19703 - protein, 111 aa, Artificial Sequence
  Synthetic polypeptide
FLHFHLSCNPSVPKQRVMKLTKMVLVLVVVFILSAAPYHVIQLVNLQMEQPTLAFYVGYYLSICLSYASSSINPFLYILLSGNFQKRLPQIQRRATEKEINNMGNTLKSHF

SEQ ID NO: 19704 - protein, 97 aa, Artificial Sequence
  Synthetic polypeptide
GRSQDGRIGTAPVYSSQRERRRRRVISAFPSELQSQCTKTESDEVDKDGAGAGGSLYPECCPLSCDTTGELTDGTAHTGLLCGLLPLHLSQLCQQQH

SEQ ID NO: 19705 - protein, 24 aa, Artificial Sequence
  Synthetic polypeptide
AAGTLGRPHRQNNFQQNQWLENRF

SEQ ID NO: 19706 - protein, 31 aa, Artificial Sequence
  Synthetic polypeptide
GPTGEISLRSQCQEKLFLLSSWHIGKASQAE

SEQ ID NO: 19707 - protein, 138 aa, Artificial Sequence
  Synthetic polypeptide
LRILSTKSHSVPLMRTNRRNFSQVSVPGKALSPEQLAHWEGLTGRITFNKTNGLRTDFDLDVISLKEEGLEKIGTWDPASGLNMTESQKGKPANITDSLSNRSLIVTTILEEPYVLFKKSDKPLYGNDRFEGYCIDLL

SEQ ID NO: 19708 - protein, 503 aa, Artificial Sequence
  Synthetic polypeptide
LRILSTKSHSVPLMRTNRRNFSQVSVPGKALSPEQLAHWEGLTGRITFNKTNGLRTDFDLDVISLKEEGLEKIGTWDPASGLNMTESQKGKPANITDSLSNRSLIVTTILEEPYVLFKKSDKPLYGNDRFEGYCIDLLRELSTILGFTYEIRLVEDGKYGAQDDANGQWNGMVRELIDHKADLAVAPLAITYVREKVIDFSKPFMTLGISILYRKPNGSELMPKALSTRIVGGIWWFFTLIIISSYTANLAAFLTVERMESPIDSADDLAKQTKIEYGAVEDGATMTFFKKSKISTYDKMWAFMSSRRQSVLVKSNEEGIQRVLTSDYAFLMESTTIEFVTQRNCNLTQIGGLIDSKGYGVGTPMGSPYRDKITIAILQLQEEGKLHMMKEKWWRGNGCPEEESKEASALGVQNIGGIFIVLAAGLVLSVFVAVGEFLYKSKKNAQLEKRSFCSAMVEELRMSLKCQRRLKHKPQAPVIVKTEEVINMHTFNDRRLPGKETMA

SEQ ID NO: 19709 - protein, 540 aa, Artificial Sequence
  Synthetic polypeptide
LRILSTKSHSVPLMRTNRRNFSQVSVPGKALSPEQLAHWEGLTGRITFNKTNGLRTDFDLDVISLKEEGLEKIGTWDPASGLNMTESQKGKPANITDSLSNRSLIVTTILEEPYVLFKKSDKPLYGNDRFEGYCIDLLRELSTILGFTYEIRLVEDGKYGAQDDANGQWNGMVRELIDHKADLAVAPLAITYVREKVIDFSKPFMTLGISILYRKPNGTNPGVFSFLNPLSPDIWMYILLAYLGVSCVLFVIARFSPYEWYNPHPCNPDSDVVENNFTLLNSFWFGVGALMQQGSELMPKALSTRIVGGIWWFFTLIIISSYTANLAAFLTVERMESPIDSADDLAKQTKIEYGAVEDGATMTFFKKSKISTYDKMWAFMSSRRQSVLVKSNEEGIQRVLTSDYAFLMESTTIEFVTQRNCNLTQIGGLIDSKGYGVGTPMGSPYRDKITIAILQLQEEGKLHMMKEKWWRGNGCPEEESKEASALGVQNIGGIFIVLAAGLVLSVFVAVGEFLYKSKKNAQLEKESSIWLVPPYHPDTV

SEQ ID NO: 19710 - protein, 563 aa, Artificial Sequence
  Synthetic polypeptide
LRILSTKSHSVPLMRTNRRNFSQVSVPGKALSPEQLAHWEGLTGRITFNKTNGLRTDFDLDVISLKEEGLEKIGTWDPASGLNMTESQKGKPANITDSLSNRSLIVTTILEEPYVLFKKSDKPLYGNDRFEGYCIDLLRELSTILGFTYEIRLVEDGKYGAQDDANGQWNGMVRELIDHKADLAVAPLAITYVREKVIDFSKPFMTLGISILYRKPNGTNPGVFSFLNPLSPDIWMYILLAYLGVSCVLFVIARFSPYEWYNPHPCNPDSDVVENNFTLLNSFWFGVGALMQQGSELMPKALSTRIVGGIWWFFTLIIISSYTANLAAFLTVERMESPIDSADDLAKQTKIEYGAVEDGATMTFFKKSKISTYDKMWAFMSSRRQSVLVKSNEEGIQRVLTSDYAFLMESTTIEFVTQRNCNLTQIGGLIDSKGYGVGTPMGSPYRDKITIAILQLQEEGKLHMMKEKWWRGNGCPEEESKEASALGVQNIGGIFIVLAAGLVLSVFVAVGEFLYKSKKNAQLEKRAKTKLPQDYVFLPILESVSISTVLSSSPSSSSLSSCS

SEQ ID NO: 19711 - protein, 579 aa, Artificial Sequence
  Synthetic polypeptide
LRILSTKSHSVPLMRTNRRNFSQVSVPGKALSPEQLAHWEGLTGRITFNKTNGLRTDFDLDVISLKEEGLEKIGTWDPASGLNMTESQKGKPANITDSLSNRSLIVTTILEEPYVLFKKSDKPLYGNDRFEGYCIDLLRELSTILGFTYEIRLVEDGKYGAQDDANGQWNGMVRELIDHKADLAVAPLAITYVREKVIDFSKPFMTLGISILYRKPNGTNPGVFSFLNPLSPDIWMYILLAYLGVSCVLFVIARFSPYEWYNPHPCNPDSDVVENNFTLLNSFWFGVGALMQQGSELMPKALSTRIVGGIWWFFTLIIISSYTANLAAFLTVERMESPIDSADDLAKQTKIEYGAVEDGATMTFFKKSKISTYDKMWAFMSSRRQSVLVKSNEEGIQRVLTSDYAFLMESTTIEFVTQRNCNLTQIGGLIDSKGYGVGTPMGSPYRDKITIAILQLQEEGKLHMMKEKWWRGNGCPEEESKEASALGVQNIGGIFIVLAAGLVLSVFVAVGEFLYKSKKNAQLEKRSFCSAMVEELRMSLKCQRRLKHKPQAPVIVKTEEVINMHTFNDRRLPGKETMA

SEQ ID NO: 19712 - protein, 121 aa, Artificial Sequence
  Synthetic polypeptide
GQVRWLMPVISVLWEAELDGSQGSPYRDKITIAILQLQEEGKLHMMKEKWWRGNGCPEEESKEASALGVQNIGGIFIVLAAGLVLSVFVAVGEFLYKSKKNAQLEKESSIWLVPPYHPDTV

SEQ ID NO: 19713 - protein, 144 aa, Artificial Sequence
  Synthetic polypeptide
GQVRWLMPVISVLWEAELDGSQGSPYRDKITIAILQLQEEGKLHMMKEKWWRGNGCPEEESKEASALGVQNIGGIFIVLAAGLVLSVFVAVGEFLYKSKKNAQLEKRAKTKLPQDYVFLPILESVSISTVLSSSPSSSSLSSCS

SEQ ID NO: 19714 - protein, 160 aa, Artificial Sequence
  Synthetic polypeptide
GQVRWLMPVISVLWEAELDGSQGSPYRDKITIAILQLQEEGKLHMMKEKWWRGNGCPEEESKEASALGVQNIGGIFIVLAAGLVLSVFVAVGEFLYKSKKNAQLEKRSFCSAMVEELRMSLKCQRRLKHKPQAPVIVKTEEVINMHTFNDRRLPGKETMA

SEQ ID NO: 19715 - protein, 109 aa, Artificial Sequence
  Synthetic polypeptide
PGSVAYACNLSTLGGRAGWITRFSISRQNYHSNSSAARGRQTAYDEGEMVEGQWLPRRGEQRGQCPGGSEYWWHLHCSGSRLGAFSFCGSGRIFIQIQKKRSIGKESQD

SEQ ID NO: 19716 - protein, 109 aa, Artificial Sequence
  Synthetic polypeptide
PGSVAYACNLSTLGGRAGWITRFSISRQNYHSNSSAARGRQTAYDEGEMVEGQWLPRRGEQRGQCPGGSEYWWHLHCSGSRLGAFSFCGSGRIFIQIQKKRSIGKEVLL

SEQ ID NO: 19717 - protein, 121 aa, Artificial Sequence
  Synthetic polypeptide
PGSVAYACNLSTLGGRAGWITRFSISRQNYHSNSSAARGRQTAYDEGEMVEGQWLPRRGEQRGQCPGGSEYWWHLHCSGSRLGAFSFCGSGRIFIQIQKKRSIGKGIFYLVSATIPSRHCL

SEQ ID NO: 19718 - protein, 22 aa, Artificial Sequence
  Synthetic polypeptide
SQYFGRPSWMDHKVLHIETKLP

SEQ ID NO: 19719 - protein, 126 aa, Artificial Sequence
  Synthetic polypeptide
ETCEGRNSCVSCFNVSVVNTTCFWIECKDESYCSHNSTVSDCQVGNTTDFCSAKPTVQPSPSTTSKTVTTSGTTNNTVTPTSQPVRKSTFDAASFIGGIVLVLGVQAVIFFLYKFCKSKERNYHTL

SEQ ID NO: 19720 - protein, 107 aa, Artificial Sequence
  Synthetic polypeptide
ETCEGRNSCVSCFNVSVVNTTCFWIECKDESYCSHNSTVSDCQVGNTTDFCSGTTNNTVTPTSQPVRKSTFDAASFIGGIVLVLGVQAVIFFLYKFCKSKERNYHTL

SEQ ID NO: 19721 - protein, 99 aa, Artificial Sequence
  Synthetic polypeptide
ETCEGRNSCVSCFNVSVVNTTCFWIECKDESYCSHNSTVSDCQVGNTTDFCSVSTATPVPTANSTAKPTVQPSPSTTSKTVTTSEIRCHTRNYIPDLKK

SEQ ID NO: 19722 - protein, 131 aa, Artificial Sequence
  Synthetic polypeptide
ETCEGRNSCVSCFNVSVVNTTCFWIECKDESYCSHNSTVSDCQVGNTTDFCSVSTATPVPTANSTAKPTVQPSPSTTSKTVTTSGTTNNTVTPTSQPVRKSTFDAASFIGGIVLVLEIRCHTRNYIPDLKK

SEQ ID NO: 19723 - protein, 139 aa, Artificial Sequence
  Synthetic polypeptide
ETCEGRNSCVSCFNVSVVNTTCFWIECKDESYCSHNSTVSDCQVGNTTDFCSVSTATPVPTANSTAKPTVQPSPSTTSKTVTTSGTTNNTVTPTSQPVRKSTFDAASFIGGIVLVLGVQAVIFFLYKFCKSKERNYHTL

SEQ ID NO: 19724 - protein, 120 aa, Artificial Sequence
  Synthetic polypeptide
ETCEGRNSCVSCFNVSVVNTTCFWIECKDESYCSHNSTVSDCQVGNTTDFCSVSTATPVPTANSTGTTNNTVTPTSQPVRKSTFDAASFIGGIVLVLGVQAVIFFLYKFCKSKERNYHTL

SEQ ID NO: 19725 - protein, 25 aa, Artificial Sequence
  Synthetic polypeptide
QKPVKVETAAFPVLMLALLILPAFG

SEQ ID NO: 19726 - protein, 3 aa, Artificial Sequence
  Synthetic polypeptide
RNL

SEQ ID NO: 19727 - protein, 189 aa, Artificial Sequence
  Synthetic polypeptide
DKDAAALLLANEVASGYLVVGFVYVMEFIGMKSRTWASVHLHSFFAVGTLLVALTGYLVRTWWLYQMILSTVTVPFILCCWVLPETPFWLLSEGRYEEAQKIVDIMAKWNRASSCKLSELLSLDLQGPVSNSPTEVQKHNLSYLFYNWSITKRTLTVWLIWFTGSLGFYSFSLNSVNLGGNEYLNLFLL

SEQ ID NO: 19728 - protein, 232 aa, Artificial Sequence
  Synthetic polypeptide
DKDAAALLLANEVASGYLVVGFVYVMEFIGMKSRTWASVHLHSFFAVGTLLVALTGYLVRTWWLYQMILSTVTVPFILCCWVLPETPFWLLSEGRYEEAQKIVDIMAKWNRASSCKLSELLSLDLQGPVSNSPTEVQKHNLSYLFYNWSITKRTLTVWLIWFTGSLGFYSFSLNSVNLGGNEYLNLFLLGVVEIPAYTFVCIAMDKVGRRTVLAYSLFCSALACGVVMVIPQ

SEQ ID NO: 19729 - protein, 372 aa, Artificial Sequence
  Synthetic polypeptide
DKDAAALLLANEVASGYLVVGFVYVMEFIGMKSRTWASVHLHSFFAVGTLLVALTGYLVRTWWLYQMILSTVTVPFILCCWVLPETPFWLLSEGRYEEAQKIVDIMAKWNRASSCKLSELLSLDLQGPVSNSPTEVQKHNLSYLFYNWSITKRTLTVWLIWFTGSLGFYSFSLNSVNLGGNEYLNLFLLGVVEIPAYTFVCIAMDKVGRRTVLAYSLFCSALACGVVMVIPQKHYILGVVTAMVGKFAIGAAFGLIYLYTAELYPTIVRSLAVGSGSMVCRLASILAPFSVDLSSIWIFIPQLFVGTMALLSGVLTLKLPETLGKRLATTWEEAAKLESENESKSSKLLLTTNNSGLEKTEAITPRDSGLGE

SEQ ID NO: 19730 - protein, 310 aa, Artificial Sequence
  Synthetic polypeptide
DKDAAALLLANEVASGYLVVGFVYVMEFIGMKSRTWASVHLHSFFAVGTLLVALTGYLVRTWWLYQMILSTVTVPFILCCWVLPETPFWLLSEGRYEEAQKIVDIMAKWNRASSCKLSELLSLDLQGPVSNSPTEVQKHNLSYLFYNWSITKRTLTVWLIWFTGSLGFYSFSLNSVNLGGNEYLNLFLLGVVEIPAYTFVCIAMDKVGRRTVLAYSLFCSALACGVVMVIPQKHYILGVVTAMVGKFAIGAAFGLIYLYTAELYPTIVRSLAVGSGSMVCRLASILAPFSVDLSSIWIFIPQLLGQHLQE

SEQ ID NO: 19731 - protein, 46 aa, Artificial Sequence
  Synthetic polypeptide
FNPLSVKCHLDSLWDLGIRGPETKMLLPYCLLTKLQVAILWWGLSM

SEQ ID NO: 19732 - protein, 85 aa, Artificial Sequence
  Synthetic polypeptide
RSCKWLSCGGVCLCDGIHWHEVSDMGVCPFAFLFCSWNPAGGFDRILGQDLVALPDDPLHSDCPLYPVLLGAPRDTFLASLRGTI

SEQ ID NO: 19733 - protein, 24 aa, Artificial Sequence
  Synthetic polypeptide
DKDAAALLLANEARTPGGLVGHKQ

SEQ ID NO: 19734 - protein, 73 aa, Artificial Sequence; identical to SEQ ID NO: 4123
  Synthetic polypeptide

SEQ ID NO: 19735 - protein, 250 aa, Artificial Sequence; identical to SEQ ID NO: 2662
  Synthetic polypeptide

SEQ ID NO: 19736 - protein, 293 aa, Artificial Sequence; identical to SEQ ID NO: 2528
  Synthetic polypeptide

SEQ ID NO: 19737 - protein, 433 aa, Artificial Sequence; identical to SEQ ID NO: 2164
  Synthetic polypeptide

SEQ ID NO: 19738 - protein, 371 aa, Artificial Sequence; identical to SEQ ID NO: 2301
  Synthetic polypeptide

SEQ ID NO: 19739 - protein, 2 aa, Artificial Sequence
  Synthetic polypeptide
RS

SEQ ID NO: 19740 - protein, 44 aa, Artificial Sequence
  Synthetic polypeptide
DGTCSSLPSTMIVRLPQSHGTRCGTGSSSGLSSLLCLSMVLQEC

SEQ ID NO: 19741 - protein, 39 aa, Artificial Sequence
  Synthetic polypeptide
GFPSHMELDVVLDLPLGSLLFSVCPWCCRSVDVCDAAEA

SEQ ID NO: 19742 - protein, 64 aa, Artificial Sequence
  Synthetic polypeptide
GGGMIFKYDNICKVPAKYIVYGAAVAGIYRVAGKNMAPLEALVWGVGQTVLTLIISFSRILATL

SEQ ID NO: 19743 - protein, 52 aa, Artificial Sequence
  Synthetic polypeptide
SSCKIHSIWCSSSGHLQSSWEEHGPFGSAGMGRWTDCTDINHLLFKDPRYTL

SEQ ID NO: 19744 - protein, 5 aa, Artificial Sequence
  Synthetic polypeptide
YMVQQ

SEQ ID NO: 19745 - protein, 706 aa, Artificial Sequence
  Synthetic polypeptide
DFGLRTFELMLELVKTLGDCFEISVFLQTLAMIHSIEMINNSTLLPGVKLGYEIYDTCTEVTVAMAATLRFLSKFNCSRETVEFKCDYSSYMPRVKAVIGSGYSEITMAVSRMLNLQLMPQVGYESTAEILSDKIRFPSFLRTVPSDFHQIKAMAHLIQKSGWNWIGIITTDDDYGRLALNTFIIQAEANNVCIAFKEVLPAFLSDNTIEVRINRTLKKIILEAQLLGVLKNVTFTDGWNSFHFDAHGDLNTGYDVVLWKEINGHMTVTKMAEYDLQNDVFIIPDQETKNEFRNLKQIQSKCSKECSPGQMKKTTRSQHICCYECQNCPENHYTNQTDMPHCLLCNNKTHWAPVRSTMCFEKEVEYLNWNDSLAILLLILSLLGIIFVLVVGIIFTRNLNTPVVKSSGGLRVCYVILLCHFLNFASTSFFIGEPQDFTCKTRQTMFGVSFTLCISCILTKSLKILLAFSFDPKLQKFLKCLYRPILIIFTCTGIQVVICTLWLIFAAPTVEVNVSLPRVIILECEEGSILAFGTMLGYIAILAFICFIFAFKGKYENYNEAKFITFGMLIYFIAWITFIPIYATTFGKYVPAVEIIVILISNYGILYCTFIPKCYVIICKQEINTKSAFLKMIYSYSSHSVSSIALSPASLDSMSGNVTMTNPSSSGKSATWQKSKDLQAQAFAHICRENATSVSKTLPRKRMSSI

SEQ ID NO: 19746 - protein, 881 aa, Artificial Sequence
  Synthetic polypeptide
DFGLRTFELMLELVKTLGDCFEISVFLQTLAMIHSIEMINNSTLLPGVKLGYEIYDTCTEVTVAMAATLRFLSKFNCSRETVEFKCDYSSYMPRVKAVIGSGYSEITMAVSRMLNLQLMPQVGYESTAEILSDKIRFPSFLRTVPSDFHQIKAMAHLIQKSGWNWIGIITTDDDYGRLALNTFIIQAEANNVCIAFKEVLPAFLSDNTIEVRINRTLKKIILEAQVNVIVVFLRQFHVFDLFNKAIEMNINKMWIASDNWSTATKITTIPNVKKIGKVVGFAFRRGNISSFHSFLQNLHLLPSDSHKLLHEYAMHLSACAYVKDTDLSQCIFNHSQRTLAYKANKAIERNFVMRNDFLWDYAEPGLIHSIQLAVFALGYAIRDLCQARDCQNPNAFQPWELLGVLKNVTFTDGWNSFHFDAHGDLNTGYDVVLWKEINGHMTVTKMAEYDLQNDVFIIPDQETKNEFRNLKQIQSKCSKECSPGQMKKTTRSQHICCYECQNCPENHYTNQTDMPHCLLCNNKTHWAPVRSTMCFEKEVEYLNWNDSLAILLLILSLLGIIFVLVVGIIFTRNLNTPVVKSSGGLRVCYVILLCHFLNFASTSFFIGEPQDFTCKTRQTMFGVSFTLCISCILTKSLKILLAFSFDPKLQKFLKCLYRPILIIFTCTGIQVVICTLWLIFAAPTVEVNVSLPRVIILECEEGSILAFGTMLGYIAILAFICFIFAFKGKYENYNEAKFITFGMLIYFIAWITFIPIYATTFGKYVPAVEIIVILISNYGILYCTFIPKCYVIICKQEINTKSAFLKMIYSYSSHSVSSIALSPASLDSMSGNVTMTNPSSSGKSATWQKSKDLQAQAFAHICRENATSVSKTLPRKRMSSI

SEQ ID NO: 19747 - protein, 810 aa, Artificial Sequence
  Synthetic polypeptide
DFGLRTFELMLELVKTLGDCFEISVFLQTLAMIHSIEMINNSTLLPGVKLGYEIYDTCTEVTVAMAATLRFLSKFNCSRETVEFKCDYSSYMPRVKAVIGSGYSEITMAVSRMLNLQLMPQVGYESTAEILSDKIRFPSFLRTVPSDFHQIKAMAHLIQKSGWNWIGIITTDDDYGRLALNTFIIQAEANNVCIAFKEVLPAFLSDNTIEVRINRTLKKIILEAQVNVIVVFLRQFHVFDLFNKAIEMNINKMWIASDNWSTATKITTIPNVKKIGKVVGFAFRRGNISSFHSFLQNLHLLPSDSHKLLHEYAMHLSACAYVKDTDLSQCIFNHSQRTLAYKANKAIERNFVMRNDFLWDYAEPGLIHSIQLAVFALGYAIRDLCQARDCQNPNAFQPWEQIQSKCSKECSPGQMKKTTRSQHICCYECQNCPENHYTNQTDMPHCLLCNNKTHWAPVRSTMCFEKEVEYLNWNDSLAILLLILSLLGIIFVLVVGIIFTRNLNTPVVKSSGGLRVCYVILLCHFLNFASTSFFIGEPQDFTCKTRQTMFGVSFTLCISCILTKSLKILLAFSFDPKLQKFLKCLYRPILIIFTCTGIQVVICTLWLIFAAPTVEVNVSLPRVIILECEEGSILAFGTMLGYIAILAFICFIFAFKGKYENYNEAKFITFGMLIYFIAWITFIPIYATTFGKYVPAVEIIVILISNYGILYCTFIPKCYVIICKQEINTKSAFLKMIYSYSSHSVSSIALSPASLDSMSGNVTMTNPSSSGKSATWQKSKDLQAQAFAHICRENATSVSKTLPRKRMSSI

SEQ ID NO: 19748 - protein, 6 aa, Artificial Sequence
  Synthetic polypeptide
DTGRLL

SEQ ID NO: 19749 - protein, 18 aa, Artificial Sequence
  Synthetic polypeptide
LRHWETALKYQFFFKLLP

SEQ ID NO: 19750 - protein, 68 aa, Artificial Sequence; identical to SEQ ID NO: 4280
  Synthetic polypeptide

SEQ ID NO: 19751 - protein, 37 aa, Artificial Sequence; identical to SEQ ID NO: 5999
  Synthetic polypeptide

SEQ ID NO: 19752 - protein, 2308 aa, Artificial Sequence; identical to SEQ ID NO: 1434
  Synthetic polypeptide

SEQ ID NO: 19753 - protein, 2314 aa, Artificial Sequence; identical to SEQ ID NO: 1433
  Synthetic polypeptide

SEQ ID NO: 19754 - protein, 2328 aa, Artificial Sequence
  Synthetic polypeptide
HPVKKVPASPLPSATIESFLKSPQSCGTGQQLDLGTPHNLSEPCIQGCHFWNSVDQKNCALKCNDTYATVCERESCEVGCSSAEGAYEEEVLENADLPTAPFASSIGSHNMTLRWKSANFSGVKYIIQWKYAQLLGSWTYTKTVSRPSYVVKPLHPFTEYIFRVVWIFTAQLQLYSPPSPSYRTHPHGVPETAPLIRNIESSSPDTVEVSWDPPQFPGGPILGYNLRLISKNQKLDAGTQRTSFQFYSTLPNTIYRFSIAAVNEVGEGPEAESSITTSSSAVQQEEQWLFLSRKTSLRKRSLKHLVDEAHCLRLDAIYHNITGISVDVHQQIVYFSEGTLIWAKKAANMSDVSDLRIFYRGSGLISSISIDWLYQRMYFIMDELVCVCDLENCSNIEEITPPSISAPQKIVADSYNGYVFYLLRDGIYRADLPVPSGRCAEAVRIVESCTLKDFAIKPQAKRIIYFNDTAQVFMSTFLDGSASHLILPRIPFADVKSFACENNDFLVTDGKVIFQQDALSFNEFIVGCDLSHIEEFGFGNLVIFGSSSQLHPLPGRPQELSVLFGSHQALVQWKPPALAIGASPSAWQNWTYEVKVSTQDPPEVTHIFLNISGTMLNVPELQSAMKYKVSVRASSPKRPGPWSEPSVGTTLVPASEPPFIMAVKEDGLWSKPLNSFGPGEFLSSDIGNVSDMDWYNNSLYYSDTKGDVFVWLLNGTDISENYHLPSIAGAGALAFEWLGHFLYWAGKTYVIQRQSVLTGHTDIVTHVKLLVNDMVVDSVGGYLYWTTLYSVESTRLNGESSLVLQTQPWFSGKKVIALTLDLSDGLLYWLVQDSQCIHLYTAVLRGQSTGDTTITEFAAWSTSEISQNALMYYSGRLFWINGFRIITTQEIGQKTSVSVLEPARFNQFTIIQTSLKPLPGNFSFTPKVIPDSVQESSFRIEGNASSFQILWNGPPAVDWGVVFYSVEFSAHSKFLASEQHSLPVFTVEGLEPYALFNLSVTPYTYWGKGPKTSLSLRAPETVPSAPENPRIFILPSGKCCNKNEVVVEFRWNKPKHENGVLTKFEIFYNISNQSITNKTCEDWIAVNVTPSVMSFQLEGMSPRCFIAFQVRAFTSKGPGPYADVVKSTTSEINPFPHLITLLGNKIVFLDMDQNQVVWTFSAERVISAVCYTADNEMGYYAEGDSLFLLHLHNRSSSELFQDSLVFDITVITIDWISRHLYFALKESQNGMQVFDVDLEHKVKYPREVKIHNRNSTIISFSVYPLLSRLYWTEVSNFGYQMFYYSIISHTLHRILQPTATNQQNKRNQCSCNVTEFELSGAMAIDTSNLEKPLIYFAKAQEIWAMDLEGCQCWRVITVPAMLGKTLVSLTVDGDLIYWIITAKDSTQIYQAKKGNGAIVSQVKALRSRHILAYSSVMQPFPDKAFLSLASDTVEPTILNATNTSLTIRLPLAKTNLTWYGITSPTPTYLVYYAEVNDRKNSSDLKYRILEFQDSIALIEDLQPFSTYMIQIAVKNYYSDPLEHLPPGKEIWGKTKNGVPEAVQLINTTVRSDTSLIISWRESHKPNGPKESVRYQLAISHLALIPETPLRQSEFPNGRLTLLVTRLSGGNIYVLKVLACHSEEMWCTESHPVTVEMFNTPEKPYSLVPENTSLQFNWKAPLNVNLIRFWVELQKWKYNEFYHVKTSCSQGPAYVCNITNLQPYTSYNVRVVVVYKTGENSTSLPESFKTKAGVPNKPGIPKLLEGSKNSIQWEKAEDNGCRITYYILEIRKSTSNNLQNQNLRWKMTFNGSCSSVCTWKSKNLKGIFQFRVVAANNLGFGEYSGISENIILVGDDFWIPETSFILTIIVGIFLVVTIPLTFVWHRRLKNQKSAKEGVTVLINEDKELAELRGLAAGVGLANACYAIHTLPTQEEIENLPAFPREKLTLRLLLGSGAFGEVYEGTAVDILGVGSGEIKVAVKTLKKGSTDQEKIEFLKEAHLMSKFNHPNILKQLGVCLLNEPQYIILELMEGGDLLTYLRKARMATFYGPLLTLVDLVDLCVDISKGCVYLERMHFIHRDLAARNCLVSVKDYTSPRIVKIGDFGLARDIYKNDYYRKRGEGLLPVRWMAPESLMDGIFTTQSDVWSFGILIWEILTLGHQPYPAHSNLDVLNYVQTGGRLEPPRNCPDDLWNLMTQCWAQEPDQRPTFHRIQDQLQLFRNFFLNSIYKSRDEANNSGVINESFEGEDGDVICLNSDDIMPVALMETKNREGLNYMVLATECGQGEEKSEGPLGSQESESCGLRKEEKEPHADKDFCQEKQVAYCPSGKPEGLNYACLTHSGYGDGSD

SEQ ID NO: 19755 - protein, 2334 aa, Artificial Sequence
  Synthetic polypeptide
HPVKKVPASPLPSATIESFLKSPQSCGTGQQLDLGTPHNLSEPCIQGCHFWNSVDQKNCALKCRESCEVGCSSAEGAYEEEVLENADLPTAPFASSIGSHNMTLRWKSANFSGVKYIIQWKYAQLLGSWTYTKTVSRPSYVVKPLHPFTEYIFRVVWIFTAQLQLYSPPSPSYRTHPHGVPETAPLIRNIESSSPDTVEVSWDPPQFPGGPILGYNLRLISKNQKLDAGTQRTSFQFYSTLPNTIYRFSIAAVNEVGEGPEAESSITTSSSAVQQEEQWLFLSRKTSLRKRSLKHLVDEAHCLRLDAIYHNITGISVDVHQQIVYFSEGTLIWAKKAANMSDVSDLRIFYRGSGLISSISIDWLYQRMYFIMDELVCVCDLENCSNIEEITPPSISAPQKIVADSYNGYVFYLLRDGIYRADLPVPSGRCAEAVRIVESCTLKDFAIKPQAKRIIYFNDTAQVFMSTFLDGSASHLILPRIPFADVKSFACENNDFLVTDGKVIFQQDALSFNEFIVGCDLSHIEEFGFGNLVIFGSSSQLHPLPGRPQELSVLFGSHQALVQWKPPALAIGANVILISDIIELFELGPSAWQNWTYEVKVSTQDPPEVTHIFLNISGTMLNVPELQSAMKYKVSVRASSPKRPGPWSEPSVGTTLVPASEPPFIMAVKEDGLWSKPLNSFGPGEFLSSDIGNVSDMDWYNNSLYYSDTKGDVFVWLLNGTDISENYHLPSIAGAGALAFEWLGHFLYWAGKTYVIQRQSVLTGHTDIVTHVKLLVNDMVVDSVGGYLYWTTLYSVESTRLNGESSLVLQTQPWFSGKKVIALTLDLSDGLLYWLVQDSQCIHLYTAVLRGQSTGDTTITEFAAWSTSEISQNALMYYSGRLFWINGFRIITTQEIGQKTSVSVLEPARFNQFTIIQTSLKPLPGNFSFTPKVIPDSVQESSFRIEGNASSFQILWNGPPAVDWGVVFYSVEFSAHSKFLASEQHSLPVFTVEGLEPYALFNLSVTPYTYWGKGPKTSLSLRAPETVPSAPENPRIFILPSGKCCNKNEVVVEFRWNKPKHENGVLTKFEIFYNISNQSITNKTCEDWIAVNVTPSVMSFQLEGMSPRCFIAFQVRAFTSKGPGPYADVVKSTTSEINPFPHLITLLGNKIVFLDMDQNQVVWTFSAERVISAVCYTADNEMGYYAEGDSLFLLHLHNRSSSELFQDSLVFDITVITIDWISRHLYFALKESQNGMQVFDVDLEHKVKYPREVKIHNRNSTIISFSVYPLLSRLYWTEVSNFGYQMFYYSIISHTLHRILQPTATNQQNKRNQCSCNVTEFELSGAMAIDTSNLEKPLIYFAKAQEIWAMDLEGCQCWRVITVPAMLAGKTLVSLTVDGDLIYWIITAKDSTQIYQAKKGNGAIVSQVKALRSRHILAYSSVMQPFPDKAFLSLASDTVEPTILNATNTSLTIRLPLAKTNLTWYGITSPTPTYLVYYAEVNDRKNSSDLKYRILEFQDSIALIEDLQPFSTYMIQIAVKNYYSDPLEHLPPGKEIWGKTKNGVPEAVQLINTTVRSDTSLIISWRESHKPNGPKESVRYQLAISHLALIPETPLRQSEFPNGRLTLLVTRLSGGNIYVLKVLACHSEEMWCTESHPVTVEMFNTPEKPYSLVPENTSLQFNWKAPLNVNLIRFWVELQKWKYNEFYHVKTSCSQGPAYVCNITNLQPYTSYNVRVVVVYKTGENSTSLPESFKTKAGVPNKPGIPKLLEGSKNSIQWEKAEDNGCRITYYILEIRKSTSNNLQNQNLRWKMTFNGSCSSVCTWKSKNLKGIFQFRVVAANNLGFGEYSGISENIILVGDDFWIPETSFILTIIVGIFLVVTIPLTFVWHRRLKNQKSAKEGVTVLINEDKELAELRGLAAGVGLANACYAIHTLPTQEEIENLPAFPREKLTLRLLLGSGAFGEVYEGTAVDILGVGSGEIKVAVKTLKKGSTDQEKIEFLKEAHLMSKFNHPNILKQLGVCLLNEPQYIILELMEGGDLLTYLRKARMATFYGPLLTLVDLVDLCVDISKGCVYLERMHFIHRDLAARNCLVSVKDYTSPRIVKIGDFGLARDIYKNDYYRKRGEGLLPVRWMAPESLMDGIFTTQSDVWSFGILIWEILTLGHQPYPAHSNLDVLNYVQTGGRLEPPRNCPDDLWNLMTQCWAQEPDQRPTFHRIQDQLQLFRNFFLNSIYKSRDEANNSGVINESFEGEDGDVICLNSDDIMPVALMETKNREGLNYMVLATECGQGEEKSEGPLGSQESESCGLRKEEKEPHADKDFCQEKQVAYCPSGKPEGLNYACLTHSGYGDGSD

SEQ ID NO: 19756 - protein, 46 aa, Artificial Sequence
  Synthetic polypeptide
QCLAVPHPCSLLLLTPCEESACFPFAFCHDRKFPEVSPVMWNWPAA

SEQ ID NO: 19757 - protein, 19 aa, Artificial Sequence
  Synthetic polypeptide
SLPSHVELASSLTLAHHII

SEQ ID NO: 19758 - protein, 10 aa, Artificial Sequence
  Synthetic polypeptide
GLFSQAEIRC

SEQ ID NO: 19759 - protein, 72 aa, Artificial Sequence
  Synthetic polypeptide
NKMLKMYQLQRKLKKELKMCLPQSRKVPSVSSSVSTWMGTMAMDFSFLSLLQTALERALVKQILQDRSNKDS

SEQ ID NO: 19760 - protein, 343 aa, Artificial Sequence
  Synthetic polypeptide
AQKFETSLGNMEKKEKHVEPAKSPKKEHSVPSDKQVKAKTERAKEEIGAVSIKKAVPGKKEEKTTKTVEQEIRKEKSGKTSSILKDKEPIKGKEEKVPASLKEKEPETKKDEKMSKAGKEVKPKPPQLQGKKEEKPEPQIKKEAKPAISEKVQIHKQDIVKPEKTVSHGKPEEKVLKQVKAVTIEKTAKPKPTKKAEHREREPPSIKTDKPKPTPKGTSEVTESGKKKTEISEKESKEKADMKHLREEKVSTRKESLQLHNVTKAEKPARVSKDVEDVPASKKAKEGTEDVSPTKQKSPISFFQCVYLDGYNGYGFQFPFTPADRPGESSGQANSPGQKQQGQ

SEQ ID NO: 19761 - protein, 335 aa, Artificial Sequence
  Synthetic polypeptide
AQKFETSLGNMEKKEKHVEPAKSPKKEHSVPSDKQVKAKTERAKEEIGAVSIKKAVPGKKEEKTTKTVEQEIRKEKSGKTSSILKDKEPIKGKEEKVPASLKEKEPETKKDEKMSKAGKEVKPKPPQLQGKKEEKPEPQIKKEAKPAISEKVQIHKQDIVKPEKTVSHGKPEEKVLKQVKAVTIEKTAKPKPTKKAEHREREPPSIKTDKPKPTPKGTSEVTESGKKKTEISEKESKEKADMKHLREEKVSTRKESLQLHNVTKEDVEDVPASKKAKEGTEDVSPTKQKSPISFFQCVYLDGYNGYGFQFPFTPADRPGESSGQANSPGQKQQGQ

SEQ ID NO: 19762 - protein, 27 aa, Artificial Sequence
  Synthetic polypeptide
DQPGQHGKERKTCGTSKVTKERTLSSK

SEQ ID NO: 19763 - protein, 44 aa, Artificial Sequence
  Synthetic polypeptide
EAEVGGPLEPRSLRPAWATWKRKKNMWNQQSHQRKNTQFQVTNK

SEQ ID NO: 19764 - protein, 37 aa, Artificial Sequence
  Synthetic polypeptide
AQKFETSLGNMNRKRKKNMWNQQSHQRKNTQFQVTNK

SEQ ID NO: 19765 - protein, 340 aa, Artificial Sequence
  Synthetic polypeptide
DQPGQHEQEKKEKHVEPAKSPKKEHSVPSDKQVKAKTERAKEEIGAVSIKKAVPGKKEEKTTKTVEQEIRKEKSGKTSSILKDKEPIKGKEEKVPASLKEKEPETKKDEKMSKAGKEVKPKPPQLQGKKEEKPEPQIKKEAKPAISEKVQIHKQDIVKPEKTVSHGKPEEKVLKQVKAVTIEKTAKPKPTKKAEHREREPPSIKTDKPKPTPKGTSEVTESGKKKTEISEKESKEKADMKHLREEKVSTRKESLQLHNVTKAEKPARVSKDVEDVPASKKAKEGTEDVSPTKQKSPISFFQCVYLDGYNGYGFQFPFTPADRPGESSGQANSPGQKQQGQ

SEQ ID NO: 19766 - protein, 332 aa, Artificial Sequence
  Synthetic polypeptide
DQPGQHEQEKKEKHVEPAKSPKKEHSVPSDKQVKAKTERAKEEIGAVSIKKAVPGKKEEKTTKTVEQEIRKEKSGKTSSILKDKEPIKGKEEKVPASLKEKEPETKKDEKMSKAGKEVKPKPPQLQGKKEEKPEPQIKKEAKPAISEKVQIHKQDIVKPEKTVSHGKPEEKVLKQVKAVTIEKTAKPKPTKKAEHREREPPSIKTDKPKPTPKGTSEVTESGKKKTEISEKESKEKADMKHLREEKVSTRKESLQLHNVTKEDVEDVPASKKAKEGTEDVSPTKQKSPISFFQCVYLDGYNGYGFQFPFTPADRPGESSGQANSPGQKQQGQ

SEQ ID NO: 19767 - protein, 44 aa, Artificial Sequence
  Synthetic polypeptide
RAVPLHMLLPADMYDVPLLLLHLHHDCEASPAMWNCEMHLQPQL

SEQ ID NO: 19768 - protein, 100 aa, Artificial Sequence
  Synthetic polypeptide
WFYKGQFPCTCSCLLTCTMCLCSSFTFTMIVRPPQPCGTVKCIYNHNCDRQQKWICAQIPRKSAEEDSHRRHSDDVQLPCSLASGHCPDNHVVSCCHRYV

SEQ ID NO: 19769 - protein, 68 aa, Artificial Sequence
  Synthetic polypeptide
GLPSHVELKCIYNHNCDRQQKWICAQIPRKSAEEDSHRRHSDDVQLPCSLASGHCPDNHVVSCCHRYV

SEQ ID NO: 19770 - protein, 47 aa, Artificial Sequence
  Synthetic polypeptide
WFYKGQFPCTCSCLLTCTMCLCSSFTFTMIVRPPQPCGTEMHLQPQL

SEQ ID NO: 19771 - protein, 37 aa, Artificial Sequence
  Synthetic polypeptide
NFLKMNLPCFSLIDLSFVTGLSARTLAMSLCAGEANI

SEQ ID NO: 19772 - protein, 58 aa, Artificial Sequence
  Synthetic polypeptide
SVFCYRTFSQDPGNEFVCWRGKYLTSLDISGHLSWQILYILLSSFLVCLELFNIDLVT

SEQ ID NO: 19773 - protein, 227 aa, Artificial Sequence
  Synthetic polypeptide
EHSVPPILPYFCHVRMQQESPHQTPKVGALILHFPASRTVCVLERQIFDFLGYQWAPILANFVHIIIVILGLFGTIQYRPRYITGYAVWLVLWVTWNVFVICFYLEAGDLSKETDLILTFNISMHRSWWMENGPGCTVTSVTPAPDWAPEDHRYITVSGCLLEYQYIEVAHSSLQIVLALAGFIYACYVVKCITEEEDSFDFIGGFDSYGYQGPQKTSHLQLQPMYM

SEQ ID NO: 19774 - protein, 229 aa, Artificial Sequence
  Synthetic polypeptide
EHSVPPILPYFCHVRMQQESPHQTPKVGALILHFPASRTVCVLERQIFDFLGYQWAPILANFVHIIIVILGLFGTIQYRPRYITGYAVWLVLWVTWNVFVICFYLEAGDLSKETDLILTFNISMHRSWWMENGPGCTVTSVTPAPDWAPEDHRYITVSGCLLEYQYIEVAHSSLQIVLALAGFIYACYVVKCITEEEDSFDFIGGFDSYGYQGPQKTSHLQLQPMYMSK

SEQ ID NO: 19775 - protein, 209 aa, Artificial Sequence
  Synthetic polypeptide
EHSVPPILPYFCHVRMQQESPHQTPKVGALILHFPASRTVCVLERQIFDFLGYQWAPILANFVHIIIVILGLFGTIQYRPRYITGYAVWLVLWVTWNVFVICFYLEAGDLSKETDLILTFNISMHRSWWMENGPGCTVTSVTPAPDWAPEDHRYITVSGCLLEYQYIEVAHSSLQIVLAVSVGSQPLLLVPLGLFYFCANSVHTNGICG

SEQ ID NO: 19776 - protein, 160 aa, Artificial Sequence
  Synthetic polypeptide
EHSVPPILPYFCHVRMQQESPHQTPKVGALILHFPASRTVCVLERQIFDFLGYQWAPILANFVHIIIVILGLFGTIQYRPRYITGYAVWLVLWVTWNVFVICFYLEAGDLSKLAGFIYACYVVKCITEEEDSFDFIGGFDSYGYQGPQKTSHLQLQPMYM

SEQ ID NO: 19777 - protein, 57 aa, Artificial Sequence
  Synthetic polypeptide
GSYSPLCHVRTQCSSHFALFLPCEDATRKPSPDTKSWCLDLALPSLQNGLCAGEANI

SEQ ID NO: 19778 - protein, 52 aa, Artificial Sequence
  Synthetic polypeptide
SCTSQPPERFVCWRGKYLTSLDISGHLSWQILYILLSSFLVCLELFNIDLVT

SEQ ID NO: 19779 - protein, 162 aa, Artificial Sequence
  Synthetic polypeptide
ILSFPKHQESLSLKFTCLTEYAVWLVLWVTWNVFVICFYLEAGDLSKETDLILTFNISMHRSWWMENGPGCTVTSVTPAPDWAPEDHRYITVSGCLLEYQYIEVAHSSLQIVLALAGFIYACYVVKCITEEEDSFDFIGGFDSYGYQGPQKTSHLQLQPMYM

SEQ ID NO: 19780 - protein, 164 aa, Artificial Sequence
  Synthetic polypeptide
ILSFPKHQESLSLKFTCLTEYAVWLVLWVTWNVFVICFYLEAGDLSKETDLILTFNISMHRSWWMENGPGCTVTSVTPAPDWAPEDHRYITVSGCLLEYQYIEVAHSSLQIVLALAGFIYACYVVKCITEEEDSFDFIGGFDSYGYQGPQKTSHLQLQPMYMSK

SEQ ID NO: 19781 - protein, 144 aa, Artificial Sequence
  Synthetic polypeptide
ILSFPKHQESLSLKFTCLTEYAVWLVLWVTWNVFVICFYLEAGDLSKETDLILTFNISMHRSWWMENGPGCTVTSVTPAPDWAPEDHRYITVSGCLLEYQYIEVAHSSLQIVLAVSVGSQPLLLVPLGLFYFCANSVHTNGICG

SEQ ID NO: 19782 - protein, 95 aa, Artificial Sequence
  Synthetic polypeptide
ILSFPKHQESLSLKFTCLTEYAVWLVLWVTWNVFVICFYLEAGDLSKLAGFIYACYVVKCITEEEDSFDFIGGFDSYGYQGPQKTSHLQLQPMYM

SEQ ID NO: 19783 - protein, 6 aa, Artificial Sequence
  Synthetic polypeptide
LSMLSG

SEQ ID NO: 19784 - protein, 42 aa, Artificial Sequence
  Synthetic polypeptide
VCCLASPLGYVECVCYLLLFGGWGPLKAGRFHLRLLCCEMYN

SEQ ID NO: 19785 - protein, 35 aa, Artificial Sequence
  Synthetic polypeptide
VCCLASPLGYVECVCYLLLFGGWGPLKGNRPYPDF

SEQ ID NO: 19786 - protein, 63 aa, Artificial Sequence
  Synthetic polypeptide
FLHFHLRYWVHLTRECQTVGTVCCLASPLGYVECVCYLLLFGGWGPLKAGRFHLRLLCCEMYN

SEQ ID NO: 19787 - protein, 56 aa, Artificial Sequence
  Synthetic polypeptide
FLHFHLRYWVHLTRECQTVGTVCCLASPLGYVECVCYLLLFGGWGPLKGNRPYPDF

SEQ ID NO: 19788 - protein, 157 aa, Artificial Sequence
  Synthetic polypeptide
GTGFISLGSARQWAQYAVWLVLWVTWNVFVICFYLEAGDLSKETDLILTFNISMHRSWWMENGPGCTVTSVTPAPDWAPEDHRYITVSGCLLEYQYIEVAHSSLQIVLALAGFIYACYVVKCITEEEDSFDFIGGFDSYGYQGPQKTSHLQLQPMYM

SEQ ID NO: 19789 - protein, 159 aa, Artificial Sequence
  Synthetic polypeptide
GTGFISLGSARQWAQYAVWLVLWVTWNVFVICFYLEAGDLSKETDLILTFNISMHRSWWMENGPGCTVTSVTPAPDWAPEDHRYITVSGCLLEYQYIEVAHSSLQIVLALAGFIYACYVVKCITEEEDSFDFIGGFDSYGYQGPQKTSHLQLQPMYMSK

SEQ ID NO: 19790 - protein, 139 aa, Artificial Sequence
  Synthetic polypeptide
GTGFISLGSARQWAQYAVWLVLWVTWNVFVICFYLEAGDLSKETDLILTFNISMHRSWWMENGPGCTVTSVTPAPDWAPEDHRYITVSGCLLEYQYIEVAHSSLQIVLAVSVGSQPLLLVPLGLFYFCANSVHTNGICG

SEQ ID NO: 19791 - protein, 90 aa, Artificial Sequence
  Synthetic polypeptide
GTGFISLGSARQWAQYAVWLVLWVTWNVFVICFYLEAGDLSKLAGFIYACYVVKCITEEEDSFDFIGGFDSYGYQGPQKTSHLQLQPMYM

SEQ ID NO: 19792 - protein, 12 aa, Artificial Sequence
  Synthetic polypeptide
GVPDSGHSMLSG

SEQ ID NO: 19793 - protein, 33 aa, Artificial Sequence
  Synthetic polypeptide
ATQKTVDFIGGFDSYGYQGPQKTSHLQLQPMYM

SEQ ID NO: 19794 - protein, 35 aa, Artificial Sequence
  Synthetic polypeptide
ATQKTVDFIGGFDSYGYQGPQKTSHLQLQPMYMSK

SEQ ID NO: 19795 - protein, 25 aa, Artificial Sequence
  Synthetic polypeptide
GGGAKMAEQEQLRSTAPSVSDAEDS

SEQ ID NO: 19796 - protein, 27 aa, Artificial Sequence
  Synthetic polypeptide
GRSQDGRTGTAPVYSSQRERRRRQLIS

SEQ ID NO: 19797 - protein, 7 aa, Artificial Sequence
  Synthetic polypeptide
FLHFHLS

SEQ ID NO: 19798 - protein, 35 aa, Artificial Sequence
  Synthetic polypeptide
GRSQDGRTGTAPVYSSQRERRRRQVISAFPSELIS

SEQ ID NO: 19799 - protein, 28 aa, Artificial Sequence
  Synthetic polypeptide
VDFIGGFDSYGYQGPQKTSHLQLQPMYM

SEQ ID NO: 19800 - protein, 30 aa, Artificial Sequence
  Synthetic polypeptide
VDFIGGFDSYGYQGPQKTSHLQLQPMYMSK

SEQ ID NO: 19801 - protein, 9 aa, Artificial Sequence
  Synthetic polypeptide
FWTSQLLEL

SEQ ID NO: 19802 - protein, 4 aa, Artificial Sequence
  Synthetic polypeptide
NCNI

SEQ ID NO: 19803 - protein, 49 aa, Artificial Sequence
  Synthetic polypeptide
THHVKTQHFSSLRMQQQVTILEAESSLHQTTKPASALILDFAASRTVIF

SEQ ID NO: 19804 - protein, 1353 aa, Artificial Sequence
  Synthetic polypeptide
THHVKTQHFSSLRMQQQVTILEAESSLHQTTKPASALILDFAASRTVIFEAEVSGGRSGYIAIDDIQVLSYPCDKSPHFLRLGDVEVNAGQNATFQCIATGRDAVHNKLWLQRRNGEDIPVAQTKNINHRRFAASFRLQEVTKTDQDLYRCVTQSERGSGVSNFAQLIVREPPRPIAPPQLLGVGPTYLLIQLNANSIIGDGPIILKEVEYRMTSGSWTETHAVNAPTYKLWHLDPDTEYEIRVLLTRPGEGGTGLPGPPLITRTKCAEPMRTPKTLKIAEIQARRIAVDWESLGYNITRCHTFNVTICYHYFRGHNESKADCLDMDPKAPQHVVNHLPPYTNVSLKMILTNPEGRKESEETIIQTDEDVPGPVPVKSLQGTSFENKIFLNWKEPLDPNGIITQYEISYSSIRSFDPAVPVAGPPQTVSNLWNSTHHVFMHLHPGTTYQFFIRASTVKGFGPATAINVTTNISAPTLPDYEGVDASLNETATTITVLLRPAQAKGAPISAYQIVVEELHPHRTKREAGAMECYQVPVTYQNAMSGGAPYYFAAELPPGNLPEPAPFTVGDNRTYQGFWNPPLAPRKGYNIYFQAMSSVEKETKTQCVRIATKAAATEEPEVIPDPAKQTDRVVKIAGISAGILVFILLLLVVILIVKKRRSYYSYSYYLKLAKKRKDAMGNTRQEMTHMVNAMDRSYADQSTLHAEDPLSITFMDQHNFSPRLPNDPLVPTAVLVPITDENHSATAESSRLLDVPRYLCEGTESPYQTGQLHPAIRVADLLQHINLMKTSDSYGFKEEYESFFEGQSASWDVAKKDQNRAKNRYGNIIAYDHSRVILQPVEDDPSSDYINANYIDIWLYRDGYQRPSHYIATQGPVHETVYDFWRMIWQEQSACIVMVTNLVEVGRVKCYKYWPDDTEVYGDFKVTCVEMEPLAEYVVRTFTLERRGYNEIREVKQFHFTGWPDHGVPYHATGLLSFIRRVKLSNPPSAGPIVVHCSAGAGRTGCYIVIDIMLDMAEREGVVDIYNCVKALRSRRINMVQTEEQYIFIHDAILEACLCGETAIPVCEFKAAYFDMIRIDSQTNSSHLKDEFQTLNSVTPRLQAEDCSIACLPRNHDKNRFMDMLPPDRCLPFLITIDGESSNYINAALMDSYRQPAAFIVTQYPLPNTVKDFWRLVYDYGCTSIVMLNEVDLSQGCPQYWPEEGMLRYGPIQVECMSCSMDCDVINRIFRICNLTRPQEGYLMVQQFQYLGWASHREVPGSKRSFLKLILQVEKWQEECEEGEGRTIIHCLNGGGRSGMFCAIGIVVEMVKRQNVVDVFHAVKTLRNSKPNMVEAPEQYRFCYDVALEYLESS

SEQ ID NO: 19805 - protein, 1339 aa, Artificial Sequence
  Synthetic polypeptide
THHVKTQHFSSLRMQQQVTILEAESSLHQTTKPASALILDFAASRTVIFEAEVSGGRSGYIAIDDIQVLSYPCDKSPHFLRLGDVEVNAGQNATFQCIATGRDAVHNKLWLQRRNGEDIPVAQTKNINHRRFAASFRLQEVTKTDQDLYRCVTQSERGSGVSNFAQLIVREPPRPIAPPQLLGVGPTYLLIQLNANSIIGDGPIILKEVEYRMTSGSWTETHAVNAPTYKLWHLDPDTEYEIRVLLTRPGEGGTGLPGPPLITRTKCAEPMRTPKTLKIAEIQARRIAVDWESLGYNITRCHTFNVTICYHYFRGHNESKADCLDMDPKAPQHVVNHLPPYTNVSLKMILTNPEGRKESEETIIQTDEDVPGPVPVKSLQGTSFENKIFLNWKEPLDPNGIITQYEISYSSIRSFDPAVPVAGPPQTVSNLWNSTHHVFMHLHPGTTYQFFIRASTVKGFGPATAINVTTNISAPTLPDYEGVDASLNETATTITVLLRPAQAKGAPISAYQIVVEELHPHRTKREAGAMECYQVPVTYQNAMSGGAPYYFAAELPPGNLPEPAPFTVGDNRTYQGFWNPPLAPRKGYNIYFQAMSSVEKETKTQCVRIATKAAATEEPEVIPDPAKQTDRVVKIAGISAGILVFILLLLVVILIVKKSKLAKKRKDAMGNTRQEMTHMVNAMDRSYADQSTLHAEDPLSITFMDQHNFSPRLPNDPLVPTAVLDENHSATAESSRLLDVPRYLCEGTESPYQTGQLHPAIRVADLLQHINLMKTSDSYGFKEEYESFFEGQSASWDVAKKDQNRAKNRYGNIIAYDHSRVILQPVEDDPSSDYINANYIDIWLYRDGYQRPSHYIATQGPVHETVYDFWRMIWQEQSACIVMVTNLVEVGRVKCYKYWPDDTEVYGDFKVTCVEMEPLAEYVVRTFTLERRGYNEIREVKQFHFTGWPDHGVPYHATGLLSFIRRVKLSNPPSAGPIVVHCSAGAGRTGCYIVIDIMLDMAEREGVVDIYNCVKALRSRRINMVQTEEQYIFIHDAILEACLCGETAIPVCEFKAAYFDMIRIDSQTNSSHLKDEFQTLNSVTPRLQAEDCSIACLPRNHDKNRFMDMLPPDRCLPFLITIDGESSNYINAALMDSYRQPAAFIVTQYPLPNTVKDFWRLVYDYGCTSIVMLNEVDLSQGCPQYWPEEGMLRYGPIQVECMSCSMDCDVINRIFRICNLTRPQEGYLMVQQFQYLGWASHREVPGSKRSFLKLILQVEKWQEECEEGEGRTIIHCLNGGGRSGMFCAIGIVVEMVKRQNVVDVFHAVKTLRNSKPNMVEAPEQYRFCYDVALEYLESS

SEQ ID NO: 19806 - protein, 1338 aa, Artificial Sequence
  Synthetic polypeptide
THHVKTQHFSSLRMQQQVTILEAESSLHQTTKPASALILDFAASRTVIFEAEVSGGRSGYIAIDDIQVLSYPCDKSPHFLRLGDVEVNAGQNATFQCIATGRDAVHNKLWLQRRNGEDIPVAQTKNINHRRFAASFRLQEVTKTDQDLYRCVTQSERGSGVSNFAQLIVREPPRPIAPPQLLGVGPTYLLIQLNANSIIGDGPIILKEVEYRMTSGSWTETHAVNAPTYKLWHLDPDTEYEIRVLLTRPGEGGTGLPGPPLITRTKCAEPMRTPKTLKIAEIQARRIAVDWESLGYNITRCHTFNVTICYHYFRGHNESKADCLDMDPKAPQHVVNHLPPYTNVSLKMILTNPEGRKESEETIIQTDEDVPGPVPVKSLQGTSFENKIFLNWKEPLDPNGIITQYEISYSSIRSFDPAVPVAGPPQTVSNLWNSTHHVFMHLHPGTTYQFFIRASTVKGFGPATAINVTTNISAPTLPDYEGVDASLNETATTITVLLRPAQAKGAPISAYQIVVEELHPHRTKREAGAMECYQVPVTYQNAMSGGAPYYFAAELPPGNLPEPAPFTVGDNRTYQGFWNPPLAPRKGYNIYFQAMSSVEKETKTQCVRIATKAAATEEPEVIPDPAKQTDRVVKIAGISAGILVFILLLLVVILIVKKSKLAKKRKDAMGNTRQEMTHMVNAMDRSYADQSTLHAEDPLSITFMDQHNFSPRLPNDPLVPTAVLDENHSATAESSRLLDVPRYLCEGTESPYQTGQLHPAIRVADLLQHINLMKTSDSYGFKEEYESFFEGQSASWDVAKKDQNRAKNRYGNIIAYDHSRVILQPVEDDPSSDYINANYIDVSIFIGYQRPSHYIATQGPVHETVYDFWRMIWQEQSACIVMVTNLVEVGRVKCYKYWPDDTEVYGDFKVTCVEMEPLAEYVVRTFTLERRGYNEIREVKQFHFTGWPDHGVPYHATGLLSFIRRVKLSNPPSAGPIVVHCSAGAGRTGCYIVIDIMLDMAEREGVVDIYNCVKALRSRRINMVQTEEQYIFIHDAILEACLCGETAIPVCEFKAAYFDMIRIDSQTNSSHLKDEFQTLNSVTPRLQAEDCSIACLPRNHDKNRFMDMLPPDRCLPFLITIDGESSNYINAALMDSYRQPAAFIVTQYPLPNTVKDFWRLVYDYGCTSIVMLNEVDLSQGCPQYWPEEGMLRYGPIQVECMSCSMDCDVINRIFRICNLTRPQEGYLMVQQFQYLGWASHREVPGSKRSFLKLILQVEKWQEECEEGEGRTIIHCLNGGGRSGMFCAIGIVVEMVKRQNVVDVFHAVKTLRNSKPNMVEAPEQYRFCYDVALEYLESS

SEQ ID NO: 19807 - protein, 1343 aa, Artificial Sequence
  Synthetic polypeptide
THHVKTQHFSSLRMQQQVTILEAESSLHQTTKPASALILDFAASRTVIFEAEVSGGRSGYIAIDDIQVLSYPCDKSPHFLRLGDVEVNAGQNATFQCIATGRDAVHNKLWLQRRNGEDIPVAQTKNINHRRFAASFRLQEVTKTDQDLYRCVTQSERGSGVSNFAQLIVREPPRPIAPPQLLGVGPTYLLIQLNANSIIGDGPIILKEVEYRMTSGSWTETHAVNAPTYKLWHLDPDTEYEIRVLLTRPGEGGTGLPGPPLITRTKCAEPMRTPKTLKIAEIQARRIAVDWESLGYNITRCHTFNVTICYHYFRGHNESKADCLDMDPKAPQHVVNHLPPYTNVSLKMILTNPEGRKESEETIIQTDEDVPGPVPVKSLQGTSFENKIFLNWKEPLDPNGIITQYEISYSSIRSFDPAVPVAGPPQTVSNLWNSTHHVFMHLHPGTTYQFFIRASTVKGFGPATAINVTTNISAPTLPDYEGVDASLNETATTITVLLRPAQAKGAPISAYQIVVEELHPHRTKREAGAMECYQVPVTYQNAMSGGAPYYFAAELPPGNLPEPAPFTVGDNRTYQGFWNPPLAPRKGYNIYFQAMSSVEKETKTQCVRIATKAAATEEPEVIPDPAKQTDRVVKIAGISAGILVFILLLLVVILIVKKSKLAKKRKDAMGNTRQEMTHMVNAMDRSYADQSTLHAEDPLSITFMDQHNFSPRLPNDPLVPTAVLVPITDENHSATAESSRLLDVPRYLCEGTESPYQTGQLHPAIRVADLLQHINLMKTSDSYGFKEEYESFFEGQSASWDVAKKDQNRAKNRYGNIIAYDHSRVILQPVEDDPSSDYINANYIDIWLYRDGYQRPSHYIATQGPVHETVYDFWRMIWQEQSACIVMVTNLVEVGRVKCYKYWPDDTEVYGDFKVTCVEMEPLAEYVVRTFTLERRGYNEIREVKQFHFTGWPDHGVPYHATGLLSFIRRVKLSNPPSAGPIVVHCSAGAGRTGCYIVIDIMLDMAEREGVVDIYNCVKALRSRRINMVQTEEQYIFIHDAILEACLCGETAIPVCEFKAAYFDMIRIDSQTNSSHLKDEFQTLNSVTPRLQAEDCSIACLPRNHDKNRFMDMLPPDRCLPFLITIDGESSNYINAALMDSYRQPAAFIVTQYPLPNTVKDFWRLVYDYGCTSIVMLNEVDLSQGCPQYWPEEGMLRYGPIQVECMSCSMDCDVINRIFRICNLTRPQEGYLMVQQFQYLGWASHREVPGSKRSFLKLILQVEKWQEECEEGEGRTIIHCLNGGGRSGMFCAIGIVVEMVKRQNVVDVFHAVKTLRNSKPNMVEAPEQYRFCYDVALEYLESS

SEQ ID NO: 19808 - protein, 1321 aa, Artificial Sequence
  Synthetic polypeptide
THHVKTQHFSSLRMQQQVTILEAESSLHQTTKPASALILDFAASRTVIFEAEVSGGRSGYIAIDDIQVLSYPCDKSPHFLRLGDVEVNAGQNATFQCIATGRDAVHNKLWLQRRNGEDIPVAQTKNINHRRFAASFRLQEVTKTDQDLYRCVTQSERGSGVSNFAQLIVREPPRPIAPPQLLGVGPTYLLIQLNANSIIGDGPIILKEVEYRMTSGSWTETHAVNAPTYKLWHLDPDTEYEIRVLLTRPGEGGTGLPGPPLITRTKCAEPMRTPKTLKIAEIQARRIAVDWESLGYNITRCHTFNVTICYHYFRGHNESKADCLDMDPKAPQHVVNHLPPYTNVSLKMILTNPEGRKESEETIIQTDEDVPGPVPVKSLQGTSFENKIFLNWKEPLDPNGIITQYEISYSSIRSFDPAVPVAGPPQTVSNLWNSTHHVFMHLHPGTTYQFFIRASTVKGFGPATAINVTTNISAPTLPDYEGVDASLNETATTITVLLRPAQAKGAPISAYQIVVEELHPHRTKREAGAMECYQVPVTYQNAMSGGAPYYFAAELPPGNLPEPAPFTVGDNRTYQGFWNPPLAPRKGYNIYFQAMSSVEKETKTQCVRIATKAAATEEPEVIPDPAKQTDRVVKIAGISAGILVFILLLLVVILIVKKSKLAKKRKDAMGNTRQEMTHMVNAMDRSYADQSTLHAEDPLSITFMDQHNFSPRYENHSATAESSRLLDVPRYLCEGTESPYQTGQLHPAIRVADLLQHINLMKTSDSYGFKEEYESFFEGQSASWDVAKKDQNRAKNRYGNIIAYDHSRVILQPVEDDPSSDYINANYIDGYQRPSHYIATQGPVHETVYDFWRMIWQEQSACIVMVTNLVEVGRVKCYKYWPDDTEVYGDFKVTCVEMEPLAEYVVRTFTLERRGYNEIREVKQFHFTGWPDHGVPYHATGLLSFIRRVKLSNPPSAGPIVVHCSAGAGRTGCYIVIDIMLDMAEREGVVDIYNCVKALRSRRINMVQTEEQYIFIHDAILEACLCGETAIPVCEFKAAYFDMIRIDSQTNSSHLKDEFQTLNSVTPRLQAEDCSIACLPRNHDKNRFMDMLPPDRCLPFLITIDGESSNYINAALMDSYRQPAAFIVTQYPLPNTVKDFWRLVYDYGCTSIVMLNEVDLSQGCPQYWPEEGMLRYGPIQVECMSCSMDCDVINRIFRICNLTRPQEGYLMVQQFQYLGWASHREVPGSKRSFLKLILQVEKWQEECEEGEGRTIIHCLNGGGRSGMFCAIGIVVEMVKRQNVVDVFHAVKTLRNSKPNMVEAPEQYRFCYDVALEYLESS

SEQ ID NO: 19809 - protein, 1327 aa, Artificial Sequence
  Synthetic polypeptide
THHVKTQHFSSLRMQQQVTILEAESSLHQTTKPASALILDFAASRTVIFEAEVSGGRSGYIAIDDIQVLSYPCDKSPHFLRLGDVEVNAGQNATFQCIATGRDAVHNKLWLQRRNGEDIPVAQTKNINHRRFAASFRLQEVTKTDQDLYRCVTQSERGSGVSNFAQLIVREPPRPIAPPQLLGVGPTYLLIQLNANSIIGDGPIILKEVEYRMTSGSWTETHAVNAPTYKLWHLDPDTEYEIRVLLTRPGEGGTGLPGPPLITRTKCAEPMRTPKTLKIAEIQARRIAVDWESLGYNITRCHTFNVTICYHYFRGHNESKADCLDMDPKAPQHVVNHLPPYTNVSLKMILTNPEGRKESEETIIQTDEDVPGPVPVKSLQGTSFENKIFLNWKEPLDPNGIITQYEISYSSIRSFDPAVPVAGPPQTVSNLWNSTHHVFMHLHPGTTYQFFIRASTVKGFGPATAINVTTNISAPTLPDYEGVDASLNETATTITVLLRPAQAKGAPISAYQIVVEELHPHRTKREAGAMECYQVPVTYQNAMSGGAPYYFAAELPPGNLPEPAPFTVGDNRTYQGFWNPPLAPRKGYNIYFQAMSSVEKETKTQCVRIATKAAATEEPEVIPDPAKQTDRVVKIAGISAGILVFILLLLVVILIVKKSKLAKKRKDAMGNTRQEMTHMVNAMDRSYADQSTLHAEDPLSITFMDQHNFSPRYENHSATAESSRLLDVPRYLCEGTESPYQTGQLHPAIRVADLLQHINLMKTSDSYGFKEEYESFFEGQSASWDVAKKDQNRAKNRYGNIIAYDHSRVILQPVEDDPSSDYINANYIDIWLYRDGYQRPSHYIATQGPVHETVYDFWRMIWQEQSACIVMVTNLVEVGRVKCYKYWPDDTEVYGDFKVTCVEMEPLAEYVVRTFTLERRGYNEIREVKQFHFTGWPDHGVPYHATGLLSFIRRVKLSNPPSAGPIVVHCSAGAGRTGCYIVIDIMLDMAEREGVVDIYNCVKALRSRRINMVQTEEQYIFIHDAILEACLCGETAIPVCEFKAAYFDMIRIDSQTNSSHLKDEFQTLNSVTPRLQAEDCSIACLPRNHDKNRFMDMLPPDRCLPFLITIDGESSNYINAALMDSYRQPAAFIVTQYPLPNTVKDFWRLVYDYGCTSIVMLNEVDLSQGCPQYWPEEGMLRYGPIQVECMSCSMDCDVINRIFRICNLTRPQEGYLMVQQFQYLGWASHREVPGSKRSFLKLILQVEKWQEECEEGEGRTIIHCLNGGGRSGMFCAIGIVVEMVKRQNVVDVFHAVKTLRNSKPNMVEAPEQYRFCYDVALEYLESS

SEQ ID NO: 19810 - protein, 1320 aa, Artificial Sequence
  Synthetic polypeptide
THHVKTQHFSSLRMQQQVTILEAESSLHQTTKPASALILDFAASRTVIFEAEVSGGRSGYIAIDDIQVLSYPCDKSPHFLRLGDVEVNAGQNATFQCIATGRDAVHNKLWLQRRNGEDIPVAQTKNINHRRFAASFRLQEVTKTDQDLYRCVTQSERGSGVSNFAQLIVREPPRPIAPPQLLGVGPTYLLIQLNANSIIGDGPIILKEVEYRMTSGSWTETHAVNAPTYKLWHLDPDTEYEIRVLLTRPGEGGTGLPGPPLITRTKCAEPMRTPKTLKIAEIQARRIAVDWESLGYNITRCHTFNVTICYHYFRGHNESKADCLDMDPKAPQHVVNHLPPYTNVSLKMILTNPEGRKESEETIIQTDEDVPGPVPVKSLQGTSFENKIFLNWKEPLDPNGIITQYEISYSSIRSFDPAVPVAGPPQTVSNLWNSTHHVFMHLHPGTTYQFFIRASTVKGFGPATAINVTTNISAPTLPDYEGVDASLNETATTITVLLRPAQAKGAPISAYQIVVEELHPHRTKREAGAMECYQVPVTYQNAMSGGAPYYFAAELPPGNLPEPAPFTVGDNRTYQGFWNPPLAPRKGYNIYFQAMSSVEKETKTQCVRIATKAATEEPEVIPDPAKQTDRVVKIAGISAGILVFILLLLVVILIVKKSKLAKKRKDAMGNTRQEMTHMVNAMDRSYADQSTLHAEDPLSITFMDQHNFSPRYENHSATAESSRLLDVPRYLCEGTESPYQTGQLHPAIRVADLLQHINLMKTSDSYGFKEEYESFFEGQSASWDVAKKDQNRAKNRYGNIIAYDHSRVILQPVEDDPSSDYINANYIDGYQRPSHYIATQGPVHETVYDFWRMIWQEQSACIVMVTNLVEVGRVKCYKYWPDDTEVYGDFKVTCVEMEPLAEYVVRTFTLERRGYNEIREVKQFHFTGWPDHGVPYHATGLLSFIRRVKLSNPPSAGPIVVHCSAGAGRTGCYIVIDIMLDMAEREGVVDIYNCVKALRSRRINMVQTEEQYIFIHDAILEACLCGETAIPVCEFKAAYFDMIRIDSQTNSSHLKDEFQTLNSVTPRLQAEDCSIACLPRNHDKNRFMDMLPPDRCLPFLITIDGESSNYINAALMDSYRQPAAFIVTQYPLPNTVKDFWRLVYDYGCTSIVMLNEVDLSQGCPQYWPEEGMLRYGPIQVECMSCSMDCDVINRIFRICNLTRPQEGYLMVQQFQYLGWASHREVPGSKRSFLKLILQVEKWQEECEEGEGRTIIHCLNGGGRSGMFCAIGIVVEMVKRQNVVDVFHAVKTLRNSKPNMVEAPEQYRFCYDVALEYLESS

SEQ ID NO: 19811 - protein, 8 aa, Artificial Sequence
  Synthetic polypeptide
FTQPQVPI

SEQ ID NO: 19812 - protein, 96 aa, Artificial Sequence
  Synthetic polypeptide
MGLMRSDVFFFKKVVSLHKLSLPAAIHVRHNLLLLAFCHYYEASLATWNCMSIEPLFLHNLPSLRFLYDSGLFRSRPWRKSQTSAAYNEGERHSLH

SEQ ID NO: 19813 - protein, 1417 aa, Artificial Sequence
  Synthetic polypeptide
PRGTVCPLNPFSCIIYPASGSYMIVDSSDHDPGEKARLQLPTMKENDTHCIDFSYLLYSQKGLNPGTLNILVRVNKGPLANPIWNVTGFTGRDWLRAELAVSTFWPNEYQVIFEAEVSGGRSGYIAIDDIQVLSYPCDKSPHFLRLGDVEVNAGQNATFQCIATGRDAVHNKLWLQRRNGEDIPVAQTKNINHRRFAASFRLQEVTKTDQDLYRCVTQSERGSGVSNFAQLIVREPPRPIAPPQLLGVGPTYLLIQLNANSIIGDGPIILKEVEYRMTSGSWTETHAVNAPTYKLWHLDPDTEYEIRVLLTRPGEGGTGLPGPPLITRTKCAEPMRTPKTLKIAEIQARRIAVDWESLGYNITRCHTFNVTICYHYFRGHNESKADCLDMDPKAPQHVVNHLPPYTNVSLKMILTNPEGRKESEETIIQTDEDVPGPVPVKSLQGTSFENKIFLNWKEPLDPNGIITQYEISYSSIRSFDPAVPVAGPPQTVSNLWNSTHHVFMHLHPGTTYQFFIRASTVKGFGPATAINVTTNISAPTLPDYEGVDASLNETATTITVLLRPAQAKGAPISAYQIVVEELHPHRTKREAGAMECYQVPVTYQNAMSGGAPYYFAAELPPGNLPEPAPFTVGDNRTYQGFWNPPLAPRKGYNIYFQAMSSVEKETKTQCVRIATKAAATEEPEVIPDPAKQTDRVVKIAGISAGILVFILLLLVVILIVKKRRSYYSYSYYLKLAKKRKDAMGNTRQEMTHMVNAMDRSYADQSTLHAEDPLSITFMDQHNFSPRLPNDPLVPTAVLVPITDENHSATAESSRLLDVPRYLCEGTESPYQTGQLHPAIRVADLLQHINLMKTSDSYGFKEEYESFFEGQSASWDVAKKDQNRAKNRYGNIIAYDHSRVILQPVEDDPSSDYINANYIDIWLYRDGYQRPSHYIATQGPVHETVYDFWRMIWQEQSACIVMVTNLVEVGRVKCYKYWPDDTEVYGDFKVTCVEMEPLAEYVVRTFTLERRGYNEIREVKQFHFTGWPDHGVPYHATGLLSFIRRVKLSNPPSAGPIVVHCSAGAGRTGCYIVIDIMLDMAEREGVVDIYNCVKALRSRRINMVQTEEQYIFIHDAILEACLCGETAIPVCEFKAAYFDMIRIDSQTNSSHLKDEFQTLNSVTPRLQAEDCSIACLPRNHDKNRFMDMLPPDRCLPFLITIDGESSNYINAALMDSYRQPAAFIVTQYPLPNTVKDFWRLVYDYGCTSIVMLNEVDLSQGCPQYWPEEGMLRYGPIQVECMSCSMDCDVINRIFRICNLTRPQEGYLMVQQFQYLGWASHREVPGSKRSFLKLILQVEKWQEECEEGEGRTIIHCLNGGGRSGMFCAIGIVVEMVKRQNVVDVFHAVKTLRNSKPNMVEAPEQYRFCYDVALEYLESS

SEQ ID NO: 19814 - protein, 1403 aa, Artificial Sequence
  Synthetic polypeptide
PRGTVCPLNPFSCIIYPASGSYMIVDSSDHDPGEKARLQLPTMKENDTHCIDFSYLLYSQKGLNPGTLNILVRVNKGPLANPIWNVTGFTGRDWLRAELAVSTFWPNEYQVIFEAEVSGGRSGYIAIDDIQVLSYPCDKSPHFLRLGDVEVNAGQNATFQCIATGRDAVHNKLWLQRRNGEDIPVAQTKNINHRRFAASFRLQEVTKTDQDLYRCVTQSERGSGVSNFAQLIVREPPRPIAPPQLLGVGPTYLLIQLNANSIIGDGPIILKEVEYRMTSGSWTETHAVNAPTYKLWHLDPDTEYEIRVLLTRPGEGGTGLPGPPLITRTKCAEPMRTPKTLKIAEIQARRIAVDWESLGYNITRCHTFNVTICYHYFRGHNESKADCLDMDPKAPQHVVNHLPPYTNVSLKMILTNPEGRKESEETIIQTDEDVPGPVPVKSLQGTSFENKIFLNWKEPLDPNGIITQYEISYSSIRSFDPAVPVAGPPQTVSNLWNSTHHVFMHLHPGTTYQFFIRASTVKGFGPATAINVTTNISAPTLPDYEGVDASLNETATTITVLLRPAQAKGAPISAYQIVVEELHPHRTKREAGAMECYQVPVTYQNAMSGGAPYYFAAELPPGNLPEPAPFTVGDNRTYQGFWNPPLAPRKGYNIYFQAMSSVEKETKTQCVRIATKAAATEEPEVIPDPAKQTDRVVKIAGISAGILVFILLLLVVILIVKKSKLAKKRKDAMGNTRQEMTHMVNAMDRSYADQSTLHAEDPLSITFMDQHNFSPRLPNDPLVPTAVLDENHSATAESSRLLDVPRYLCEGTESPYQTGQLHPAIRVADLLQHINLMKTSDSYGFKEEYESFFEGQSASWDVAKKDQNRAKNRYGNIIAYDHSRVILQPVEDDPSSDYINANYIDIWLYRDGYQRPSHYIATQGPVHETVYDFWRMIWQEQSACIVMVTNLVEVGRVKCYKYWPDDTEVYGDFKVTCVEMEPLAEYVVRTFTLERRGYNEIREVKQFHFTGWPDHGVPYHATGLLSFIRRVKLSNPPSAGPIVVHCSAGAGRTGCYIVIDIMLDMAEREGVVDIYNCVKALRSRRINMVQTEEQYIFIHDAILEACLCGETAIPVCEFKAAYFDMIRIDSQTNSSHLKDEFQTLNSVTPRLQAEDCSIACLPRNHDKNRFMDMLPPDRCLPFLITIDGESSNYINAALMDSYRQPAAFIVTQYPLPNTVKDFWRLVYDYGCTSIVMLNEVDLSQGCPQYWPEEGMLRYGPIQVECMSCSMDCDVINRIFRICNLTRPQEGYLMVQQFQYLGWASHREVPGSKRSFLKLILQVEKWQEECEEGEGRTIIHCLNGGGRSGMFCAIGIVVEMVKRQNVVDVFHAVKTLRNSKPNMVEAPEQYRFCYDVALEYLESS

SEQ ID NO: 19815 - protein, 1402 aa, Artificial Sequence
  Synthetic polypeptide
PRGTVCPLNPFSCIIYPASGSYMIVDSSDHDPGEKARLQLPTMKENDTHCIDFSYLLYSQKGLNPGTLNILVRVNKGPLANPIWNVTGFTGRDWLRAELAVSTFWPNEYQVIFEAEVSGGRSGYIAIDDIQVLSYPCDKSPHFLRLGDVEVNAGQNATFQCIATGRDAVHNKLWLQRRNGEDIPVAQTKNINHRRFAASFRLQEVTKTDQDLYRCVTQSERGSGVSNFAQLIVREPPRPIAPPQLLGVGPTYLLIQLNANSIIGDGPIILKEVEYRMTSGSWTETHAVNAPTYKLWHLDPDTEYEIRVLLTRPGEGGTGLPGPPLITRTKCAEPMRTPKTLKIAEIQARRIAVDWESLGYNITRCHTFNVTICYHYFRGHNESKADCLDMDPKAPQHVVNHLPPYTNVSLKMILTNPEGRKESEETIIQTDEDVPGPVPVKSLQGTSFENKIFLNWKEPLDPNGIITQYEISYSSIRSFDPAVPVAGPPQTVSNLWNSTHHVFMHLHPGTTYQFFIRASTVKGFGPATAINVTTNISAPTLPDYEGVDASLNETATTITVLLRPAQAKGAPISAYQIVVEELHPHRTKREAGAMECYQVPVTYQNAMSGGAPYYFAAELPPGNLPEPAPFTVGDNRTYQGFWNPPLAPRKGYNIYFQAMSSVEKETKTQCVRIATKAAATEEPEVIPDPAKQTDRVVKIAGISAGILVFILLLLVVILIVKKSKLAKKRKDAMGNTRQEMTHMVNAMDRSYADQSTLHAEDPLSITFMDQHNFSPRLPNDPLVPTAVLDENHSATAESSRLLDVPRYLCEGTESPYQTGQLHPAIRVADLLQHINLMKTSDSYGFKEEYESFFEGQSASWDVAKKDQNRAKNRYGNIIAYDHSRVILQPVEDDPSSDYINANYIDVSIFIGYQRPSHYIATQGPVHETVYDFWRMIWQEQSACIVMVTNLVEVGRVKCYKYWPDDTEVYGDFKVTCVEMEPLAEYVVRTFTLERRGYNEIREVKQFHFTGWPDHGVPYHATGLLSFIRRVKLSNPPSAGPIVVHCSAGAGRTGCYIVIDIMLDMAEREGVVDIYNCVKALRSRRINMVQTEEQYIFIHDAILEACLCGETAIPVCEFKAAYFDMIRIDSQTNSSHLKDEFQTLNSVTPRLQAEDCSIACLPRNHDKNRFMDMLPPDRCLPFLITIDGESSNYINAALMDSYRQPAAFIVTQYPLPNTVKDFWRLVYDYGCTSIVMLNEVDLSQGCPQYWPEEGMLRYGPIQVECMSCSMDCDVINRIFRICNLTRPQEGYLMVQQFQYLGWASHREVPGSKRSFLKLILQVEKWQEECEEGEGRTIIHCLNGGGRSGMFCAIGIVVEMVKRQNVVDVFHAVKTLRNSKPNMVEAPEQYRFCYDVALEYLESS

SEQ ID NO: 19816 - protein, 1407 aa, Artificial Sequence
  Synthetic polypeptide
PRGTVCPLNPFSCIIYPASGSYMIVDSSDHDPGEKARLQLPTMKENDTHCIDFSYLLYSQKGLNPGTLNILVRVNKGPLANPIWNVTGFTGRDWLRAELAVSTFWPNEYQVIFEAEVSGGRSGYIAIDDIQVLSYPCDKSPHFLRLGDVEVNAGQNATFQCIATGRDAVHNKLWLQRRNGEDIPVAQTKNINHRRFAASFRLQEVTKTDQDLYRCVTQSERGSGVSNFAQLIVREPPRPIAPPQLLGVGPTYLLIQLNANSIIGDGPIILKEVEYRMTSGSWTETHAVNAPTYKLWHLDPDTEYEIRVLLTRPGEGGTGLPGPPLITRTKCAEPMRTPKTLKIAEIQARRIAVDWESLGYNITRCHTFNVTICYHYFRGHNESKADCLDMDPKAPQHVVNHLPPYTNVSLKMILTNPEGRKESEETIIQTDEDVPGPVPVKSLQGTSFENKIFLNWKEPLDPNGIITQYEISYSSIRSFDPAVPVAGPPQTVSNLWNSTHHVFMHLHPGTTYQFFIRASTVKGFGPATAINVTTNISAPTLPDYEGVDASLNETATTITVLLRPAQAKGAPISAYQIVVEELHPHRTKREAGAMECYQVPVTYQNAMSGGAPYYFAAELPPGNLPEPAPFTVGDNRTYQGFWNPPLAPRKGYNIYFQAMSSVEKETKTQCVRIATKAAATEEPEVIPDPAKQTDRVVKIAGISAGILVFILLLLVVILIVKKSKLAKKRKDAMGNTRQEMTHMVNAMDRSYADQSTLHAEDPLSITFMDQHNFSPRLPNDPLVPTAVLVPITDENHSATAESSRLLDVPRYLCEGTESPYQTGQLHPAIRVADLLQHINLMKTSDSYGFKEEYESFFEGQSASWDVAKKDQNRAKNRYGNIIAYDHSRVILQPVEDDPSSDYINANYIDIWLYRDGYQRPSHYIATQGPVHETVYDFWRMIWQEQSACIVMVTNLVEVGRVKCYKYWPDDTEVYGDFKVTCVEMEPLAEYVVRTFTLERRGYNEIREVKQFHFTGWPDHGVPYHATGLLSFIRRVKLSNPPSAGPIVVHCSAGAGRTGCYIVIDIMLDMAEREGVVDIYNCVKALRSRRINMVQTEEQYIFIHDAILEACLCGETAIPVCEFKAAYFDMIRIDSQTNSSHLKDEFQTLNSVTPRLQAEDCSIACLPRNHDKNRFMDMLPPDRCLPFLITIDGESSNYINAALMDSYRQPAAFIVTQYPLPNTVKDFWRLVYDYGCTSIVMLNEVDLSQGCPQYWPEEGMLRYGPIQVECMSCSMDCDVINRIFRICNLTRPQEGYLMVQQFQYLGWASHREVPGSKRSFLKLILQVEKWQEECEEGEGRTIIHCLNGGGRSGMFCAIGIVVEMVKRQNVVDVFHAVKTLRNSKPNMVEAPEQYRFCYDVALEYLESS

SEQ ID NO: 19817 - protein, 1385 aa, Artificial Sequence
  Synthetic polypeptide
PRGTVCPLNPFSCIIYPASGSYMIVDSSDHDPGEKARLQLPTMKENDTHCIDFSYLLYSQKGLNPGTLNILVRVNKGPLANPIWNVTGFTGRDWLRAELAVSTFWPNEYQVIFEAEVSGGRSGYIAIDDIQVLSYPCDKSPHFLRLGDVEVNAGQNATFQCIATGRDAVHNKLWLQRRNGEDIPVAQTKNINHRRFAASFRLQEVTKTDQDLYRCVTQSERGSGVSNFAQLIVREPPRPIAPPQLLGVGPTYLLIQLNANSIIGDGPIILKEVEYRMTSGSWTETHAVNAPTYKLWHLDPDTEYEIRVLLTRPGEGGTGLPGPPLITRTKCAEPMRTPKTLKIAEIQARRIAVDWESLGYNITRCHTFNVTICYHYFRGHNESKADCLDMDPKAPQHVVNHLPPYTNVSLKMILTNPEGRKESEETIIQTDEDVPGPVPVKSLQGTSFENKIFLNWKEPLDPNGIITQYEISYSSIRSFDPAVPVAGPPQTVSNLWNSTHHVFMHLHPGTTYQFFIRASTVKGFGPATAINVTTNISAPTLPDYEGVDASLNETATTITVLLRPAQAKGAPISAYQIVVEELHPHRTKREAGAMECYQVPVTYQNAMSGGAPYYFAAELPPGNLPEPAPFTVGDNRTYQGFWNPPLAPRKGYNIYFQAMSSVEKETKTQCVRIATKAAATEEPEVIPDPAKQTDRVVKIAGISAGILVFILLLLVVILIVKKSKLAKKRKDAMGNTRQEMTHMVNAMDRSYADQSTLHAEDPLSITFMDQHNFSPRYENHSATAESSRLLDVPRYLCEGTESPYQTGQLHPAIRVADLLQHINLMKTSDSYGFKEEYESFFEGQSASWDVAKKDQNRAKNRYGNIIAYDHSRVILQPVEDDPSSDYINANYIDGYQRPSHYIATQGPVHETVYDFWRMIWQEQSACIVMVTNLVEVGRVKCYKYWPDDTEVYGDFKVTCVEMEPLAEYVVRTFTLERRGYNEIREVKQFHFTGWPDHGVPYHATGLLSFIRRVKLSNPPSAGPIVVHCSAGAGRTGCYIVIDIMLDMAEREGVVDIYNCVKALRSRRINMVQTEEQYIFIHDAILEACLCGETAIPVCEFKAAYFDMIRIDSQTNSSHLKDEFQTLNSVTPRLQAEDCSIACLPRNHDKNRFMDMLPPDRCLPFLITIDGESSNYINAALMDSYRQPAAFIVTQYPLPNTVKDFWRLVYDYGCTSIVMLNEVDLSQGCPQYWPEEGMLRYGPIQVECMSCSMDCDVINRIFRICNLTRPQEGYLMVQQFQYLGWASHREVPGSKRSFLKLILQVEKWQEECEEGEGRTIIHCLNGGGRSGMFCAIGIVVEMVKRQNVVDVFHAVKTLRNSKPNMVEAPEQYRFCYDVALEYLESS

SEQ ID NO: 19818 - protein, 1391 aa, Artificial Sequence
  Synthetic polypeptide
PRGTVCPLNPFSCIIYPASGSYMIVDSSDHDPGEKARLQLPTMKENDTHCIDFSYLLYSQKGLNPGTLNILVRVNKGPLANPIWNVTGFTGRDWLRAELAVSTFWPNEYQVIFEAEVSGGRSGYIAIDDIQVLSYPCDKSPHFLRLGDVEVNAGQNATFQCIATGRDAVHNKLWLQRRNGEDIPVAQTKNINHRRFAASFRLQEVTKTDQDLYRCVTQSERGSGVSNFAQLIVREPPRPIAPPQLLGVGPTYLLIQLNANSIIGDGPIILKEVEYRMTSGSWTETHAVNAPTYKLWHLDPDTEYEIRVLLTRPGEGGTGLPGPPLITRTKCAEPMRTPKTLKIAEIQARRIAVDWESLGYNITRCHTFNVTICYHYFRGHNESKADCLDMDPKAPQHVVNHLPPYTNVSLKMILTNPEGRKESEETIIQTDEDVPGPVPVKSLQGTSFENKIFLNWKEPLDPNGIITQYEISYSSIRSFDPAVPVAGPPQTVSNLWNSTHHVFMHLHPGTTYQFFIRASTVKGFGPATAINVTTNISAPTLPDYEGVDASLNETATTITVLLRPAQAKGAPISAYQIVVEELHPHRTKREAGAMECYQVPVTYQNAMSGGAPYYFAAELPPGNLPEPAPFTVGDNRTYQGFWNPPLAPRKGYNIYFQAMSSVEKETKTQCVRIATKAAATEEPEVIPDPAKQTDRVVKIAGISAGILVFILLLLVVILIVKKSKLAKKRKDAMGNTRQEMTHMVNAMDRSYADQSTLHAEDPLSITFMDQHNFSPRYENHSATAESSRLLDVPRYLCEGTESPYQTGQLHPAIRVADLLQHINLMKTSDSYGFKEEYESFFEGQSASWDVAKKDQNRAKNRYGNIIAYDHSRVILQPVEDDPSSDYINANYIDIWLYRDGYQRPSHYIATQGPVHETVYDFWRMIWQEQSACIVMVTNLVEVGRVKCYKYWPDDTEVYGDFKVTCVEMEPLAEYVVRTFTLERRGYNEIREVKQFHFTGWPDHGVPYHATGLLSFIRRVKLSNPPSAGPIVVHCSAGAGRTGCYIVIDIMLDMAEREGVVDIYNCVKALRSRRINMVQTEEQYIFIHDAILEACLCGETAIPVCEFKAAYFDMIRIDSQTNSSHLKDEFQTLNSVTPRLQAEDCSIACLPRNHDKNRFMDMLPPDRCLPFLITIDGESSNYINAALMDSYRQPAAFIVTQYPLPNTVKDFWRLVYDYGCTSIVMLNEVDLSQGCPQYWPEEGMLRYGPIQVECMSCSMDCDVINRIFRICNLTRPQEGYLMVQQFQYLGWASHREVPGSKRSFLKLILQVEKWQEECEEGEGRTIIHCLNGGGRSGMFCAIGIVVEMVKRQNVVDVFHAVKTLRNSKPNMVEAPEQYRFCYDVALEYLESS

SEQ ID NO: 19819 - protein, 1384 aa, Artificial Sequence
  Synthetic polypeptide
PRGTVCPLNPFSCIIYPASGSYMIVDSSDHDPGEKARLQLPTMKENDTHCIDFSYLLYSQKGLNPGTLNILVRVNKGPLANPIWNVTGFTGRDWLRAELAVSTFWPNEYQVIFEAEVSGGRSGYIAIDDIQVLSYPCDKSPHFLRLGDVEVNAGQNATFQCIATGRDAVHNKLWLQRRNGEDIPVAQTKNINHRRFAASFRLQEVTKTDQDLYRCVTQSERGSGVSNFAQLIVREPPRPIAPPQLLGVGPTYLLIQLNANSIIGDGPIILKEVEYRMTSGSWTETHAVNAPTYKLWHLDPDTEYEIRVLLTRPGEGGTGLPGPPLITRTKCAEPMRTPKTLKIAEIQARRIAVDWESLGYNITRCHTFNVTICYHYFRGHNESKADCLDMDPKAPQHVVNHLPPYTNVSLKMILTNPEGRKESEETIIQTDEDVPGPVPVKSLQGTSFENKIFLNWKEPLDPNGIITQYEISYSSIRSFDPAVPVAGPPQTVSNLWNSTHHVFMHLHPGTTYQFFIRASTVKGFGPATAINVTTNISAPTLPDYEGVDASLNETATTITVLLRPAQAKGAPISAYQIVVEELHPHRTKREAGAMECYQVPVTYQNAMSGGAPYYFAAELPPGNLPEPAPFTVGDNRTYQGFWNPPLAPRKGYNIYFQAMSSVEKETKTQCVRIATKAATEEPEVIPDPAKQTDRVVKIAGISAGILVFILLLLVVILIVKKSKLAKKRKDAMGNTRQEMTHMVNAMDRSYADQSTLHAEDPLSITFMDQHNFSPRYENHSATAESSRLLDVPRYLCEGTESPYQTGQLHPAIRVADLLQHINLMKTSDSYGFKEEYESFFEGQSASWDVAKKDQNRAKNRYGNIIAYDHSRVILQPVEDDPSSDYINANYIDGYQRPSHYIATQGPVHETVYDFWRMIWQEQSACIVMVTNLVEVGRVKCYKYWPDDTEVYGDFKVTCVEMEPLAEYVVRTFTLERRGYNEIREVKQFHFTGWPDHGVPYHATGLLSFIRRVKLSNPPSAGPIVVHCSAGAGRTGCYIVIDIMLDMAEREGVVDIYNCVKALRSRRINMVQTEEQYIFIHDAILEACLCGETAIPVCEFKAAYFDMIRIDSQTNSSHLKDEFQTLNSVTPRLQAEDCSIACLPRNHDKNRFMDMLPPDRCLPFLITIDGESSNYINAALMDSYRQPAAFIVTQYPLPNTVKDFWRLVYDYGCTSIVMLNEVDLSQGCPQYWPEEGMLRYGPIQVECMSCSMDCDVINRIFRICNLTRPQEGYLMVQQFQYLGWASHREVPGSKRSFLKLILQVEKWQEECEEGEGRTIIHCLNGGGRSGMFCAIGIVVEMVKRQNVVDVFHAVKTLRNSKPNMVEAPEQYRFCYDVALEYLESS

SEQ ID NO: 19820 - protein, 193 aa, Artificial Sequence
  Synthetic polypeptide
PRGTVCPLNPFSCIIYPASGSYMIVDSSDHDPGEKARLQLPTMKENDTHCIDFSYLLYSQKGLNPGTLNILVRVNKGPLANPIWNVTGFTGRDWLRAELAVSTFWPNEYQVIICTFLVYVLMSSVLTICVIHRCKYASHGNERLPSCLPHPHYWGSVIHRYTYASHGNERLPLFLPHPVDEEVFGDIGTKPSN

SEQ ID NO: 19821 - protein, 8 aa, Artificial Sequence
  Synthetic polypeptide
EAEVAVLL

SEQ ID NO: 19822 - protein, 47 aa, Artificial Sequence
  Synthetic polypeptide
EAEVAVLLMMVQGPVITTRICMMTLNGCMLVLKSLIIYHPRCPKVPI

SEQ ID NO: 19823 - protein, 5 aa, Artificial Sequence
  Synthetic polypeptide
GGCTF

SEQ ID NO: 19824 - protein, 1439 aa, Artificial Sequence
  Synthetic polypeptide
GGCTFDDGPGACDYHQDLYDDFEWVHVSAQEPHYLPPEMPQGSYMIVDSSDHDPGEKARLQLPTMKENDTHCIDFSYLLYSQKGLNPGTLNILVRVNKGPLANPIWNVTGFTGRDWLRAELAVSTFWPNEYQVIFEAEVSGGRSGYIAIDDIQVLSYPCDKSPHFLRLGDVEVNAGQNATFQCIATGRDAVHNKLWLQRRNGEDIPVAQTKNINHRRFAASFRLQEVTKTDQDLYRCVTQSERGSGVSNFAQLIVREPPRPIAPPQLLGVGPTYLLIQLNANSIIGDGPIILKEVEYRMTSGSWTETHAVNAPTYKLWHLDPDTEYEIRVLLTRPGEGGTGLPGPPLITRTKCAEPMRTPKTLKIAEIQARRIAVDWESLGYNITRCHTFNVTICYHYFRGHNESKADCLDMDPKAPQHVVNHLPPYTNVSLKMILTNPEGRKESEETIIQTDEDVPGPVPVKSLQGTSFENKIFLNWKEPLDPNGIITQYEISYSSIRSFDPAVPVAGPPQTVSNLWNSTHHVFMHLHPGTTYQFFIRASTVKGFGPATAINVTTNISAPTLPDYEGVDASLNETATTITVLLRPAQAKGAPISAYQIVVEELHPHRTKREAGAMECYQVPVTYQNAMSGGAPYYFAAELPPGNLPEPAPFTVGDNRTYQGFWNPPLAPRKGYNIYFQAMSSVEKETKTQCVRIATKAAATEEPEVIPDPAKQTDRVVKIAGISAGILVFILLLLVVILIVKKRRSYYSYSYYLKLAKKRKDAMGNTRQEMTHMVNAMDRSYADQSTLHAEDPLSITFMDQHNFSPRLPNDPLVPTAVLVPITDENHSATAESSRLLDVPRYLCEGTESPYQTGQLHPAIRVADLLQHINLMKTSDSYGFKEEYESFFEGQSASWDVAKKDQNRAKNRYGNIIAYDHSRVILQPVEDDPSSDYINANYIDIWLYRDGYQRPSHYIATQGPVHETVYDFWRMIWQEQSACIVMVTNLVEVGRVKCYKYWPDDTEVYGDFKVTCVEMEPLAEYVVRTFTLERRGYNEIREVKQFHFTGWPDHGVPYHATGLLSFIRRVKLSNPPSAGPIVVHCSAGAGRTGCYIVIDIMLDMAEREGVVDIYNCVKALRSRRINMVQTEEQYIFIHDAILEACLCGETAIPVCEFKAAYFDMIRIDSQTNSSHLKDEFQTLNSVTPRLQAEDCSIACLPRNHDKNRFMDMLPPDRCLPFLITIDGESSNYINAALMDSYRQPAAFIVTQYPLPNTVKDFWRLVYDYGCTSIVMLNEVDLSQGCPQYWPEEGMLRYGPIQVECMSCSMDCDVINRIFRICNLTRPQEGYLMVQQFQYLGWASHREVPGSKRSFLKLILQVEKWQEECEEGEGRTIIHCLNGGGRSGMFCAIGIVVEMVKRQNVVDVFHAVKTLRNSKPNMVEAPEQYRFCYDVALEYLESS

SEQ ID NO: 19825 - protein, 1425 aa, Artificial Sequence
  Synthetic polypeptide
GGCTFDDGPGACDYHQDLYDDFEWVHVSAQEPHYLPPEMPQGSYMIVDSSDHDPGEKARLQLPTMKENDTHCIDFSYLLYSQKGLNPGTLNILVRVNKGPLANPIWNVTGFTGRDWLRAELAVSTFWPNEYQVIFEAEVSGGRSGYIAIDDIQVLSYPCDKSPHFLRLGDVEVNAGQNATFQCIATGRDAVHNKLWLQRRNGEDIPVAQTKNINHRRFAASFRLQEVTKTDQDLYRCVTQSERGSGVSNFAQLIVREPPRPIAPPQLLGVGPTYLLIQLNANSIIGDGPIILKEVEYRMTSGSWTETHAVNAPTYKLWHLDPDTEYEIRVLLTRPGEGGTGLPGPPLITRTKCAEPMRTPKTLKIAEIQARRIAVDWESLGYNITRCHTFNVTICYHYFRGHNESKADCLDMDPKAPQHVVNHLPPYTNVSLKMILTNPEGRKESEETIIQTDEDVPGPVPVKSLQGTSFENKIFLNWKEPLDPNGIITQYEISYSSIRSFDPAVPVAGPPQTVSNLWNSTHHVFMHLHPGTTYQFFIRASTVKGFGPATAINVTTNISAPTLPDYEGVDASLNETATTITVLLRPAQAKGAPISAYQIVVEELHPHRTKREAGAMECYQVPVTYQNAMSGGAPYYFAAELPPGNLPEPAPFTVGDNRTYQGFWNPPLAPRKGYNIYFQAMSSVEKETKTQCVRIATKAAATEEPEVIPDPAKQTDRVVKIAGISAGILVFILLLLVVILIVKKSKLAKKRKDAMGNTRQEMTHMVNAMDRSYADQSTLHAEDPLSITFMDQHNFSPRLPNDPLVPTAVLDENHSATAESSRLLDVPRYLCEGTESPYQTGQLHPAIRVADLLQHINLMKTSDSYGFKEEYESFFEGQSASWDVAKKDQNRAKNRYGNIIAYDHSRVILQPVEDDPSSDYINANYIDIWLYRDGYQRPSHYIATQGPVHETVYDFWRMIWQEQSACIVMVTNLVEVGRVKCYKYWPDDTEVYGDFKVTCVEMEPLAEYVVRTFTLERRGYNEIREVKQFHFTGWPDHGVPYHATGLLSFIRRVKLSNPPSAGPIVVHCSAGAGRTGCYIVIDIMLDMAEREGVVDIYNCVKALRSRRINMVQTEEQYIFIHDAILEACLCGETAIPVCEFKAAYFDMIRIDSQTNSSHLKDEFQTLNSVTPRLQAEDCSIACLPRNHDKNRFMDMLPPDRCLPFLITIDGESSNYINAALMDSYRQPAAFIVTQYPLPNTVKDFWRLVYDYGCTSIVMLNEVDLSQGCPQYWPEEGMLRYGPIQVECMSCSMDCDVINRIFRICNLTRPQEGYLMVQQFQYLGWASHREVPGSKRSFLKLILQVEKWQEECEEGEGRTIIHCLNGGGRSGMFCAIGIVVEMVKRQNVVDVFHAVKTLRNSKPNMVEAPEQYRFCYDVALEYLESS

SEQ ID NO: 19826 - protein, 1424 aa, Artificial Sequence
  Synthetic polypeptide
GGCTFDDGPGACDYHQDLYDDFEWVHVSAQEPHYLPPEMPQGSYMIVDSSDHDPGEKARLQLPTMKENDTHCIDFSYLLYSQKGLNPGTLNILVRVNKGPLANPIWNVTGFTGRDWLRAELAVSTFWPNEYQVIFEAEVSGGRSGYIAIDDIQVLSYPCDKSPHFLRLGDVEVNAGQNATFQCIATGRDAVHNKLWLQRRNGEDIPVAQTKNINHRRFAASFRLQEVTKTDQDLYRCVTQSERGSGVSNFAQLIVREPPRPIAPPQLLGVGPTYLLIQLNANSIIGDGPIILKEVEYRMTSGSWTETHAVNAPTYKLWHLDPDTEYEIRVLLTRPGEGGTGLPGPPLITRTKCAEPMRTPKTLKIAEIQARRIAVDWESLGYNITRCHTFNVTICYHYFRGHNESKADCLDMDPKAPQHVVNHLPPYTNVSLKMILTNPEGRKESEETIIQTDEDVPGPVPVKSLQGTSFENKIFLNWKEPLDPNGIITQYEISYSSIRSFDPAVPVAGPPQTVSNLWNSTHHVFMHLHPGTTYQFFIRASTVKGFGPATAINVTTNISAPTLPDYEGVDASLNETATTITVLLRPAQAKGAPISAYQIVVEELHPHRTKREAGAMECYQVPVTYQNAMSGGAPYYFAAELPPGNLPEPAPFTVGDNRTYQGFWNPPLAPRKGYNIYFQAMSSVEKETKTQCVRIATKAAATEEPEVIPDPAKQTDRVVKIAGISAGILVFILLLLVVILIVKKSKLAKKRKDAMGNTRQEMTHMVNAMDRSYADQSTLHAEDPLSITFMDQHNFSPRLPNDPLVPTAVLDENHSATAESSRLLDVPRYLCEGTESPYQTGQLHPAIRVADLLQHINLMKTSDSYGFKEEYESFFEGQSASWDVAKKDQNRAKNRYGNIIAYDHSRVILQPVEDDPSSDYINANYIDVSIFIGYQRPSHYIATQGPVHETVYDFWRMIWQEQSACIVMVTNLVEVGRVKCYKYWPDDTEVYGDFKVTCVEMEPLAEYVVRTFTLERRGYNEIREVKQFHFTGWPDHGVPYHATGLLSFIRRVKLSNPPSAGPIVVHCSAGAGRTGCYIVIDIMLDMAEREGVVDIYNCVKALRSRRINMVQTEEQYIFIHDAILEACLCGETAIPVCEFKAAYFDMIRIDSQTNSSHLKDEFQTLNSVTPRLQAEDCSIACLPRNHDKNRFMDMLPPDRCLPFLITIDGESSNYINAALMDSYRQPAAFIVTQYPLPNTVKDFWRLVYDYGCTSIVMLNEVDLSQGCPQYWPEEGMLRYGPIQVECMSCSMDCDVINRIFRICNLTRPQEGYLMVQQFQYLGWASHREVPGSKRSFLKLILQVEKWQEECEEGEGRTIIHCLNGGGRSGMFCAIGIVVEMVKRQNVVDVFHAVKTLRNSKPNMVEAPEQYRFCYDVALEYLESS

SEQ ID NO: 19827 - protein, 1429 aa, Artificial Sequence
  Synthetic polypeptide
GGCTFDDGPGACDYHQDLYDDFEWVHVSAQEPHYLPPEMPQGSYMIVDSSDHDPGEKARLQLPTMKENDTHCIDFSYLLYSQKGLNPGTLNILVRVNKGPLANPIWNVTGFTGRDWLRAELAVSTFWPNEYQVIFEAEVSGGRSGYIAIDDIQVLSYPCDKSPHFLRLGDVEVNAGQNATFQCIATGRDAVHNKLWLQRRNGEDIPVAQTKNINHRRFAASFRLQEVTKTDQDLYRCVTQSERGSGVSNFAQLIVREPPRPIAPPQLLGVGPTYLLIQLNANSIIGDGPIILKEVEYRMTSGSWTETHAVNAPTYKLWHLDPDTEYEIRVLLTRPGEGGTGLPGPPLITRTKCAEPMRTPKTLKIAEIQARRIAVDWESLGYNITRCHTFNVTICYHYFRGHNESKADCLDMDPKAPQHVVNHLPPYTNVSLKMILTNPEGRKESEETIIQTDEDVPGPVPVKSLQGTSFENKIFLNWKEPLDPNGIITQYEISYSSIRSFDPAVPVAGPPQTVSNLWNSTHHVFMHLHPGTTYQFFIRASTVKGFGPATAINVTTNISAPTLPDYEGVDASLNETATTITVLLRPAQAKGAPISAYQIVVEELHPHRTKREAGAMECYQVPVTYQNAMSGGAPYYFAAELPPGNLPEPAPFTVGDNRTYQGFWNPPLAPRKGYNIYFQAMSSVEKETKTQCVRIATKAAATEEPEVIPDPAKQTDRVVKIAGISAGILVFILLLLVVILIVKKSKLAKKRKDAMGNTRQEMTHMVNAMDRSYADQSTLHAEDPLSITFMDQHNFSPRLPNDPLVPTAVLVPITDENHSATAESSRLLDVPRYLCEGTESPYQTGQLHPAIRVADLLQHINLMKTSDSYGFKEEYESFFEGQSASWDVAKKDQNRAKNRYGNIIAYDHSRVILQPVEDDPSSDYINANYIDIWLYRDGYQRPSHYIATQGPVHETVYDFWRMIWQEQSACIVMVTNLVEVGRVKCYKYWPDDTEVYGDFKVTCVEMEPLAEYVVRTFTLERRGYNEIREVKQFHFTGWPDHGVPYHATGLLSFIRRVKLSNPPSAGPIVVHCSAGAGRTGCYIVIDIMLDMAEREGVVDIYNCVKALRSRRINMVQTEEQYIFIHDAILEACLCGETAIPVCEFKAAYFDMIRIDSQTNSSHLKDEFQTLNSVTPRLQAEDCSIACLPRNHDKNRFMDMLPPDRCLPFLITIDGESSNYINAALMDSYRQPAAFIVTQYPLPNTVKDFWRLVYDYGCTSIVMLNEVDLSQGCPQYWPEEGMLRYGPIQVECMSCSMDCDVINRIFRICNLTRPQEGYLMVQQFQYLGWASHREVPGSKRSFLKLILQVEKWQEECEEGEGRTIIHCLNGGGRSGMFCAIGIVVEMVKRQNVVDVFHAVKTLRNSKPNMVEAPEQYRFCYDVALEYLESS

SEQ ID NO: 19828 - protein, 1407 aa, Artificial Sequence
  Synthetic polypeptide
GGCTFDDGPGACDYHQDLYDDFEWVHVSAQEPHYLPPEMPQGSYMIVDSSDHDPGEKARLQLPTMKENDTHCIDFSYLLYSQKGLNPGTLNILVRVNKGPLANPIWNVTGFTGRDWLRAELAVSTFWPNEYQVIFEAEVSGGRSGYIAIDDIQVLSYPCDKSPHFLRLGDVEVNAGQNATFQCIATGRDAVHNKLWLQRRNGEDIPVAQTKNINHRRFAASFRLQEVTKTDQDLYRCVTQSERGSGVSNFAQLIVREPPRPIAPPQLLGVGPTYLLIQLNANSIIGDGPIILKEVEYRMTSGSWTETHAVNAPTYKLWHLDPDTEYEIRVLLTRPGEGGTGLPGPPLITRTKCAEPMRTPKTLKIAEIQARRIAVDWESLGYNITRCHTFNVTICYHYFRGHNESKADCLDMDPKAPQHVVNHLPPYTNVSLKMILTNPEGRKESEETIIQTDEDVPGPVPVKSLQGTSFENKIFLNWKEPLDPNGIITQYEISYSSIRSFDPAVPVAGPPQTVSNLWNSTHHVFMHLHPGTTYQFFIRASTVKGFGPATAINVTTNISAPTLPDYEGVDASLNETATTITVLLRPAQAKGAPISAYQIVVEELHPHRTKREAGAMECYQVPVTYQNAMSGGAPYYFAAELPPGNLPEPAPFTVGDNRTYQGFWNPPLAPRKGYNIYFQAMSSVEKETKTQCVRIATKAAATEEPEVIPDPAKQTDRVVKIAGISAGILVFILLLLVVILIVKKSKLAKKRKDAMGNTRQEMTHMVNAMDRSYADQSTLHAEDPLSITFMDQHNFSPRYENHSATAESSRLLDVPRYLCEGTESPYQTGQLHPAIRVADLLQHINLMKTSDSYGFKEEYESFFEGQSASWDVAKKDQNRAKNRYGNIIAYDHSRVILQPVEDDPSSDYINANYIDGYQRPSHYIATQGPVHETVYDFWRMIWQEQSACIVMVTNLVEVGRVKCYKYWPDDTEVYGDFKVTCVEMEPLAEYVVRTFTLERRGYNEIREVKQFHFTGWPDHGVPYHATGLLSFIRRVKLSNPPSAGPIVVHCSAGAGRTGCYIVIDIMLDMAEREGVVDIYNCVKALRSRRINMVQTEEQYIFIHDAILEACLCGETAIPVCEFKAAYFDMIRIDSQTNSSHLKDEFQTLNSVTPRLQAEDCSIACLPRNHDKNRFMDMLPPDRCLPFLITIDGESSNYINAALMDSYRQPAAFIVTQYPLPNTVKDFWRLVYDYGCTSIVMLNEVDLSQGCPQYWPEEGMLRYGPIQVECMSCSMDCDVINRIFRICNLTRPQEGYLMVQQFQYLGWASHREVPGSKRSFLKLILQVEKWQEECEEGEGRTIIHCLNGGGRSGMFCAIGIVVEMVKRQNVVDVFHAVKTLRNSKPNMVEAPEQYRFCYDVALEYLESS

SEQ ID NO: 19829 - protein, 1413 aa, Artificial Sequence
  Synthetic polypeptide
GGCTFDDGPGACDYHQDLYDDFEWVHVSAQEPHYLPPEMPQGSYMIVDSSDHDPGEKARLQLPTMKENDTHCIDFSYLLYSQKGLNPGTLNILVRVNKGPLANPIWNVTGFTGRDWLRAELAVSTFWPNEYQVIFEAEVSGGRSGYIAIDDIQVLSYPCDKSPHFLRLGDVEVNAGQNATFQCIATGRDAVHNKLWLQRRNGEDIPVAQTKNINHRRFAASFRLQEVTKTDQDLYRCVTQSERGSGVSNFAQLIVREPPRPIAPPQLLGVGPTYLLIQLNANSIIGDGPIILKEVEYRMTSGSWTETHAVNAPTYKLWHLDPDTEYEIRVLLTRPGEGGTGLPGPPLITRTKCAEPMRTPKTLKIAEIQARRIAVDWESLGYNITRCHTFNVTICYHYFRGHNESKADCLDMDPKAPQHVVNHLPPYTNVSLKMILTNPEGRKESEETIIQTDEDVPGPVPVKSLQGTSFENKIFLNWKEPLDPNGIITQYEISYSSIRSFDPAVPVAGPPQTVSNLWNSTHHVFMHLHPGTTYQFFIRASTVKGFGPATAINVTTNISAPTLPDYEGVDASLNETATTITVLLRPAQAKGAPISAYQIVVEELHPHRTKREAGAMECYQVPVTYQNAMSGGAPYYFAAELPPGNLPEPAPFTVGDNRTYQGFWNPPLAPRKGYNIYFQAMSSVEKETKTQCVRIATKAAATEEPEVIPDPAKQTDRVVKIAGISAGILVFILLLLVVILIVKKSKLAKKRKDAMGNTRQEMTHMVNAMDRSYADQSTLHAEDPLSITFMDQHNFSPRYENHSATAESSRLLDVPRYLCEGTESPYQTGQLHPAIRVADLLQHINLMKTSDSYGFKEEYESFFEGQSASWDVAKKDQNRAKNRYGNIIAYDHSRVILQPVEDDPSSDYINANYIDIWLYRDGYQRPSHYIATQGPVHETVYDFWRMIWQEQSACIVMVTNLVEVGRVKCYKYWPDDTEVYGDFKVTCVEMEPLAEYVVRTFTLERRGYNEIREVKQFHFTGWPDHGVPYHATGLLSFIRRVKLSNPPSAGPIVVHCSAGAGRTGCYIVIDIMLDMAEREGVVDIYNCVKALRSRRINMVQTEEQYIFIHDAILEACLCGETAIPVCEFKAAYFDMIRIDSQTNSSHLKDEFQTLNSVTPRLQAEDCSIACLPRNHDKNRFMDMLPPDRCLPFLITIDGESSNYINAALMDSYRQPAAFIVTQYPLPNTVKDFWRLVYDYGCTSIVMLNEVDLSQGCPQYWPEEGMLRYGPIQVECMSCSMDCDVINRIFRICNLTRPQEGYLMVQQFQYLGWASHREVPGSKRSFLKLILQVEKWQEECEEGEGRTIIHCLNGGGRSGMFCAIGIVVEMVKRQNVVDVFHAVKTLRNSKPNMVEAPEQYRFCYDVALEYLESS

SEQ ID NO: 19830 - protein, 1406 aa, Artificial Sequence
  Synthetic polypeptide
GGCTFDDGPGACDYHQDLYDDFEWVHVSAQEPHYLPPEMPQGSYMIVDSSDHDPGEKARLQLPTMKENDTHCIDFSYLLYSQKGLNPGTLNILVRVNKGPLANPIWNVTGFTGRDWLRAELAVSTFWPNEYQVIFEAEVSGGRSGYIAIDDIQVLSYPCDKSPHFLRLGDVEVNAGQNATFQCIATGRDAVHNKLWLQRRNGEDIPVAQTKNINHRRFAASFRLQEVTKTDQDLYRCVTQSERGSGVSNFAQLIVREPPRPIAPPQLLGVGPTYLLIQLNANSIIGDGPIILKEVEYRMTSGSWTETHAVNAPTYKLWHLDPDTEYEIRVLLTRPGEGGTGLPGPPLITRTKCAEPMRTPKTLKIAEIQARRIAVDWESLGYNITRCHTFNVTICYHYFRGHNESKADCLDMDPKAPQHVVNHLPPYTNVSLKMILTNPEGRKESEETIIQTDEDVPGPVPVKSLQGTSFENKIFLNWKEPLDPNGIITQYEISYSSIRSFDPAVPVAGPPQTVSNLWNSTHHVFMHLHPGTTYQFFIRASTVKGFGPATAINVTTNISAPTLPDYEGVDASLNETATTITVLLRPAQAKGAPISAYQIVVEELHPHRTKREAGAMECYQVPVTYQNAMSGGAPYYFAAELPPGNLPEPAPFTVGDNRTYQGFWNPPLAPRKGYNIYFQAMSSVEKETKTQCVRIATKAATEEPEVIPDPAKQTDRVVKIAGISAGILVFILLLLVVILIVKKSKLAKKRKDAMGNTRQEMTHMVNAMDRSYADQSTLHAEDPLSITFMDQHNFSPRYENHSATAESSRLLDVPRYLCEGTESPYQTGQLHPAIRVADLLQHINLMKTSDSYGFKEEYESFFEGQSASWDVAKKDQNRAKNRYGNIIAYDHSRVILQPVEDDPSSDYINANYIDGYQRPSHYIATQGPVHETVYDFWRMIWQEQSACIVMVTNLVEVGRVKCYKYWPDDTEVYGDFKVTCVEMEPLAEYVVRTFTLERRGYNEIREVKQFHFTGWPDHGVPYHATGLLSFIRRVKLSNPPSAGPIVVHCSAGAGRTGCYIVIDIMLDMAEREGVVDIYNCVKALRSRRINMVQTEEQYIFIHDAILEACLCGETAIPVCEFKAAYFDMIRIDSQTNSSHLKDEFQTLNSVTPRLQAEDCSIACLPRNHDKNRFMDMLPPDRCLPFLITIDGESSNYINAALMDSYRQPAAFIVTQYPLPNTVKDFWRLVYDYGCTSIVMLNEVDLSQGCPQYWPEEGMLRYGPIQVECMSCSMDCDVINRIFRICNLTRPQEGYLMVQQFQYLGWASHREVPGSKRSFLKLILQVEKWQEECEEGEGRTIIHCLNGGGRSGMFCAIGIVVEMVKRQNVVDVFHAVKTLRNSKPNMVEAPEQYRFCYDVALEYLESS

SEQ ID NO: 19831 - protein, 215 aa, Artificial Sequence
  Synthetic polypeptide
GGCTFDDGPGACDYHQDLYDDFEWVHVSAQEPHYLPPEMPQGSYMIVDSSDHDPGEKARLQLPTMKENDTHCIDFSYLLYSQKGLNPGTLNILVRVNKGPLANPIWNVTGFTGRDWLRAELAVSTFWPNEYQVIICTFLVYVLMSSVLTICVIHRCKYASHGNERLPSCLPHPHYWGSVIHRYTYASHGNERLPLFLPHPVDEEVFGDIGTKPSN

SEQ ID NO: 19832 - protein, 12 aa, Artificial Sequence
  Synthetic polypeptide
SQYFERLRWLYF

SEQ ID NO: 19833 - protein, 27 aa, Artificial Sequence
  Synthetic polypeptide
SQHFGRLRQTDHLSNSNSESKFAIWEA

SEQ ID NO: 19834 - protein, 276 aa, Artificial Sequence
  Synthetic polypeptide
VTATVKVNLPFGRPRVLQKNVDHCLLYHREYVSGFGKAMRMPMWSSYTVPQLGDTSPLPPTVPDCLRADVRVPPSESQKCSFYLADKNITHGFLYPPASNRTSDSQYDALITSNLVPMYEEFRKMWDYFHSVLLIKHATERNGVNVVSGPIFDYNYDGHFDAPDEITKHLANTDVPIPTHYFVVLTSCKNKSHTPENCPGWLDVLPFIIPHRPTNVESCPEGKPEALWVEERFTAHIARVRDVELLTGLDFYQDKVQPVSEILQLKTYLPTFETTI

SEQ ID NO: 19835 - protein, 64 aa, Artificial Sequence
  Synthetic polypeptide
VTATVKVNLPFGRPRVLQKNVDHCLLYHREYVSGFGKAMRMPMWSSYTVPQLPAIEHQIANMML

SEQ ID NO: 19836 - protein, 21 aa, Artificial Sequence
  Synthetic polypeptide
LTPIISALSEAKKHQFLRRMP

SEQ ID NO: 19837 - protein, 76 aa, Artificial Sequence
  Synthetic polypeptide
MAAVTDTYNLSTFRSQETPVSQEDALNLMNENIDILETAIKQAAEQGARIIVTPEDALYGWKFTRETVFPYLEDIP

SEQ ID NO: 19838 - protein, 141 aa, Artificial Sequence
  Synthetic polypeptide
MAAVTDTYNLSTFRSQETPVSQEDALNLMNENIDILETAIKQAAEQGARIIVTPEDALYGWKFTRETVFPYLEDIPDPQVNWIPCQDPHRFGHTPVQARLSCLAKDNSIYVLANLGDKKPCNSRDSTCPPNGYFQYNTNVV

SEQ ID NO: 19839 - protein, 167 aa, Artificial Sequence
  Synthetic polypeptide
MAAVTDTYNLSTFRSQETPVSQEDALNLMNENIDILETAIKQAAEQGARIIVTPEDALYGWKFTRETVFPYLEDIPDPQVNWIPCQDPHRFGHTPVQARLSCLAKDNSIYVLANLGDKKPCNSRDSTCPPNGYFQYNTNVVYNTEGKLVARYHKETLQSVKRSFAVI

SEQ ID NO: 19840 - protein, 170 aa, Artificial Sequence
  Synthetic polypeptide
MAAVTDTYNLSTFRSQETPVSQEDALNLMNENIDILETAIKQAAEQGARIIVTPEDALYGWKFTRETVFPYLEDIPDPQVNWIPCQDPHRFGHTPVQARLSCLAKDNSIYVLANLGDKKPCNSRDSTCPPNGYFQYNTNVVYNTEGKLVARYHKEVVFMHQMVPKCIIMT

SEQ ID NO: 19841 - protein, 274 aa, Artificial Sequence
  Synthetic polypeptide
MAAVTDTYNLSTFRSQETPVSQEDALNLMNENIDILETAIKQAAEQGARIIVTPEDALYGWKFTRETVFPYLEDIPDPQVNWIPCQDPHRFGHTPVQARLSCLAKDNSIYVLANLGDKKPCNSRDSTCPPNGYFQYNTNVVYNTEGKLVARYHKVCTLLKCKTTNLTTCGRPVETASTRFEMFSLSGTFGTEYVFPEVLLTEIHLSPGKFEVLKDGRLVNKNGSSGPILTVSLFGRWYTKDSLYSSCGTSNSAITYLLIFILLMIIALQNIVML

SEQ ID NO: 19842 - protein, 159 aa, Artificial Sequence
  Synthetic polypeptide
MAAVTDTYNLSTFRSQETPVSQEDALNLMNENIDILETAIKQAAEQGARIIVTPEDALYGWKFTRETVFPYLEDIPDPQVNWIPCQDPHRFGHTPVQARLSCLAKDNSIYVLANLGDKKPCNSRDSTCPPNGYFQYNTNVVYNTEGKLVARYHKVGKSH

SEQ ID NO: 19843 - protein, 495 aa, Artificial Sequence
  Synthetic polypeptide
MAAVTDTYNLSTFRSQETPVSQEDALNLMNENIDILETAIKQAAEQGARIIVTPEDALYGWKFTRETVFPYLEDIPDPQVNWIPCQDPHRFGHTPVQARLSCLAKDNSIYVLANLGDKKPCNSRDSTCPPNGYFQYNTNVVYNTEGKLVARYHKYHLYSEPQFNVPEKPELVTFNTAFGRFGIFTCFDIFFYDPGVTLVKDFHVDTILFPTAWMNVLPLLTAIEFHSAWAMGMGVNLLVANTHHVSLNMTGSGIYAPNGPKVYHYDMKTELGKLLLSEVDSHPLSSLAYPTAVNWNAYATTIKPFPVQKNTFRGFISRDGFNFTELFENAGNLTVCQKELCCHLSYRMLQKEENEVYVLGAFTGLHGRRRREYWQVCTLLKCKTTNLTTCGRPVETASTRFEMFSLSGTFGTEYVFPEVLLTEIHLSPGKFEVLKDGRLVNKNGSSGPILTVSLFGRWYTKDSLYSSCGTSNSAITYLLIFILLMIIALQNIVML

SEQ ID NO: 19844 - protein, 265 aa, Artificial Sequence
  Synthetic polypeptide
MAAVTDTYNLSTFRSQETPVSQEDALNLMNENIDILETAIKQAAEQGARIIVTPEDALYGWKFTRETVFPYLEDIPDPQVNWIPCQDPHRFGHTPVQARLSCLAKDNSIYVLANLGDKKPCNSRDSTCPPNGYFQYNTNVVYNTEGKLVARYHKYHLYSEPQFNVPEKPELVTFNTAFGRFGIFTCFDIFFYDPGVTLVKDFHVDTILFPTAWMNVLPLLTAIEFHSAWAMGMGVNLLVANTHHVSLNMTVVFMHQMVPKCIIMT

SEQ ID NO: 19845 - protein, 194 aa, Artificial Sequence
  Synthetic polypeptide
MAAVTDTYNLSTFRSQETPVSQEDALNLMNENIDILETAIKQAAEQGARIIVTPEDALYGWKFTRETVFPYLEDIPDPQVNWIPCQDPHRFGHTPVQARLSCLAKDNSIYVLANLGDKKPCNSRDSTCPPNGYFQYNTNVVYNTEGKLVARYHKYHLYSEPQFNVPEKPELVTFNTAFGRKWYLCTKWSQSVSL

SEQ ID NO: 19846 - protein, 191 aa, Artificial Sequence
  Synthetic polypeptide
MAAVTDTYNLSTFRSQETPVSQEDALNLMNENIDILETAIKQAAEQGARIIVTPEDALYGWKFTRETVFPYLEDIPDPQVNWIPCQDPHRFGHTPVQARLSCLAKDNSIYVLANLGDKKPCNSRDSTCPPNGYFQYNTNVVYNTEGKLVARYHKYHLYSEPQFNVPEKPELVTFNTAFGSLDERFAPFDSY

SEQ ID NO: 19847 - protein, 94 aa, Artificial Sequence
  Synthetic polypeptide
MAAVTDTYNLSTFRSQETPVSQEDALNLMNENIDILETAIKQAAEQGARIIVTPEDALYGWKFTRETVFPYLEDIPDPQVNWIPCQDPHRSAHC

SEQ ID NO: 19848 - protein, 35 aa, Artificial Sequence
  Synthetic polypeptide
SQHFQKPRNTSFSGGCLESHEREYRHSGDSDQAGS

SEQ ID NO: 19849 - protein, 35 aa, Artificial Sequence
  Synthetic polypeptide
ARNNFLADATISQGSKRLREMILLACHGCALYIQS

SEQ ID NO: 19850 - protein, 96 aa, Artificial Sequence
  Synthetic polypeptide
NDLIGLPWVCFIYTIMSLASLLFVVMFIPETKGCSLEQISMELAKVNYVKNNICFMSHHQEELVPKQPQKRKPQEQLLECNKLCGRGQSRQLSPET

SEQ ID NO: 19851 - protein, 8 aa, Artificial Sequence
  Synthetic polypeptide
GLSSHDEL

SEQ ID NO: 19852 - protein, 19 aa, Artificial Sequence
  Synthetic polypeptide
HDCEFPEASPAMMNCERAM

SEQ ID NO: 19853 - protein, 81 aa, Artificial Sequence
  Synthetic polypeptide
TVREPCNHANILTKPDPRTFWTNDDPAFMKQRRMGLNDFIQKIANNSYACKHPEVQSILKISQPQEPELMNANPSPPPSPS

SEQ ID NO: 19854 - protein, 432 aa, Artificial Sequence
  Synthetic polypeptide
TVREPCNHANILTKPDPRTFWTNDDPAFMKQRRMGLNDFIQKIANNSYACKHPEVQSILKISQPQEPELMNANPSPPPSPSQQINLGPSSNPHAKPSDFHFLKVIGKGSFGKVLLARHKAEEVFYAVKVLQKKAILKKKEEKHIMSERNVLLKNVKHPFLVGLHFSFQTADKLYFVLDYINGGELFYHLQRERCFLEPRARFYAAEIASALGYLHSLNIVYRDLKPENILLDSQGHIVLTDFGLCKENIEHNSTTSTFCGTPEYLAPEVLHKQPYDRTVDWWCLGAVLYEMLYGLPPFYSRNTAEMYDNILNKPLQLKPNITNSARHLLEGLLQKDRTKRLGAKDDFMEIKSHVFFSLINWDDLINKKITPPFNPNVSGPNDLRHFDPEFTEEPVPNSIGKSPDSVLVTASVKEAAEAFLGFSYAPPTDSFL

SEQ ID NO: 19855 - protein, 439 aa, Artificial Sequence
  Synthetic polypeptide
HFGRPRRADQEIKTILANMPNLYPTVGLQTPGEVVDANFGQHPFVFDIEDYMREWRTKIQAQIDRFPIGDREGEWQTMIQKMVSSYLVHHGYCATAEAFARSTDQTVLEELASIKNRQRIQKLVLAGRMGEAIETTQQLYPSLLERNPNLLFTLKVRQFIEMVNGTDSEVRCLGGRSPKSQDSYPVSPRPFSSPSMSPSHGMNIHNLASGKGSTAHFSGFESCSNGVISNKAHQSYCHSNKHQSSNLNVPELNSINMSRSQQVNNFTSNDVDMETDHYSNGVGETSSNGFLNGSSKHDHEMEDCDTEMEVDSSQLRRQLCGGSQAAIERMIHFGRELQAMSEQLRRDCGKNTANKKMLKDAFSLLAYSDPWNSPVGNQLDPIQREPVCSALNSAILETHNLPKQPPLALAMGQATQCLGLMARSGIGSCAFATVEDYLH

SEQ ID NO: 19856 - protein, 58 aa, Artificial Sequence
  Synthetic polypeptide
MGAVAHACNSSTLGGQGGRIKRSRLSWPTCQICILLWGFKHQEKWSMPILGNILSCLI

SEQ ID NO: 19857 - protein, 56 aa, Artificial Sequence
  Synthetic polypeptide
WVRWLTPVILALWEAKAGGSRDQDYPGQHAKFVSYCGASNTRRSGRCQFWATSFRV

SEQ ID NO: 19858 - protein, 19 aa, Artificial Sequence
  Synthetic polypeptide
ITEVRSSRPAWPTCDLRRL

SEQ ID NO: 19859 - protein, 172 aa, Artificial Sequence
  Synthetic polypeptide
SQHFGRPRQVDHRSQEFETSLANMRLEEIMKRTRRTEATDKKTSDQRNGDIAKGALTGGTEVSALPCTTNAPGNGKPVGSPHVVTSHQSKVTVESTPDLEKQPNENGVSVQNENFEEIINLPIGSKPSRLDVTNSESPEIPLNPILAFDDEGTLGPLPQVDGVQTQQTAEVI

SEQ ID NO: 19860 - protein, 34 aa, Artificial Sequence
  Synthetic polypeptide
WAGWLMPVIPALWEATAGRSPKSGVRDQPGQHAT

SEQ ID NO: 19861 - protein, 32 aa, Artificial Sequence
  Synthetic polypeptide
DAQLVMAKPQKMPRQFEPRIQYQQPVGFIILK

SEQ ID NO: 19862 - protein, 553 aa, Artificial Sequence
  Synthetic polypeptide
NILDFGFLDLGCSTGHGKTPKDAASVRATHPIPAACGIYYFEVKIVSKGRDGYMGIGLSAQGVNMNRLPGWDKHSYGYHGDDGHSFCSSGTGQPYGPTFTTGDVIGCCVNLINNTCFYTKNGHSLGIAFTDLPPNLYPTVGLQTPGEVVDANFGQHPFVFDIEDYMREWRTKIQAQIDRFPIGDREGEWQTMIQKMVSSYLVHHGYCATAEAFARSTDQTVLEELASIKNRQRIQKLVLAGRMGEAIETTQQLYPSLLERNPNLLFTLKVRQFIEMVNGTDSEVRCLGGRSPKSQDSYPVSPRPFSSPSMSPSHGMNIHNLASGKGSTAHFSGFESCSNGVISNKAHQSYCHSNKHQSSNLNVPELNSINMSRSQQVNNFTSNDVDMETDHYSNGVGETSSNGFLNGSSKHDHEMEDCDTEMEVDSSQLRRQLCGGSQAAIERMIHFGRELQAMSEQLRRDCGKNTANKKMLKDAFSLLAYSDPWNSPVGNQLDPIQREPVCSALNSAILETHNLPKQPPLALAMGQATQCLGLMARSGIGSCAFATVEDYLH

SEQ ID NO: 19863 - protein, 47 aa, Artificial Sequence
  Synthetic polypeptide
QRKCPMKHFRFWIFGFRMLNWSWQNPKRCRVSSSHASNTSSLWDLLF

SEQ ID NO: 19864 - protein, 5 aa, Artificial Sequence
  Synthetic polypeptide
LAYTN

SEQ ID NO: 19865 - protein, 16 aa, Artificial Sequence
  Synthetic polypeptide
RMTCLHQLMLQLNPIT

SEQ ID NO: 19866 - protein, 186 aa, Artificial Sequence
  Synthetic polypeptide
VTHDLPTPTNVTIESYNMNPIVYWEYQIMPQVPVFTVEVKNYGVKARVGQKESAYAKSEEFAVCRDGKIGPPKLDIRKEEKQIMIDIFHPSVFVNGDEQEVDYDPETTCYIRVYNVYVRMNGSEIQYKILTQKEDDCDEIQCQLAIPVSSLNSQYCVSAEGVLHVWGVTTEKSKEVCITIFNSSIK

SEQ ID NO: 19867 - protein, 147 aa, Artificial Sequence
  Synthetic polypeptide
VTHDLPTPTNVTIESYNMNPIVYWEYQIMPQVPVFTVEVKNYGVKNSEWIDACINISHHYCNISDHVGDPSNSLWVRVKARVGQKESAYAKSEEFAVCRDGKIGPPKLDIRKEEKQIMIDIFHPSVFVNGDEQEVDYDPETTCYIRV

SEQ ID NO: 19868 - protein, 172 aa, Artificial Sequence
  Synthetic polypeptide
VTHDLPTPTNVTIESYNMNPIVYWEYQIMPQVPVFTVEVKNYGVKNSEWIDACINISHHYCNISDHVGDPSNSLWVRVKARVGQKESAYAKSEEFAVCRDGKIGPPKLDIRKEEKQIMIDIFHPSVFVNGDEQEVDYDPETTCYIRVYNVYVRMNGSEIKRSCAFSLFSFFI

SEQ ID NO: 19869 - protein, 465 aa, Artificial Sequence
  Synthetic polypeptide
VTHDLPTPTNVTIESYNMNPIVYWEYQIMPQVPVFTVEVKNYGVKNSEWIDACINISHHYCNISDHVGDPSNSLWVRVKARVGQKESAYAKSEEFAVCRDGKIGPPKLDIRKEEKQIMIDIFHPSVFVNGDEQEVDYDPETTCYIRVYNVYVRMNGSEIQYKILTQKEDDCDEIQCQLAIPVSSLNSQYCVSAEGVLHVWGVTTEKSKEVCITIFNSSIKGSLWIPVVAALLLFLVLSLVFICFYIKKINPLKEKSIILPKSLISVVRSATLETKPESKYVSLITSYQPFSLEKEVVCEEPLSPATVPGMHTEDNPGKVEHTEELSSITEVVTTEENIPDVVPGSHLTPIERESSSPLSSNQSEPGSIALNSYHSRNCSESDHSRNGFDTDSSCLESHSSLSDSEFPPNNKGEIKTEGQELITVIKAPTSFGYDKPHVLVDLLVDDSGKESLIGYRPTEDSKEFS

SEQ ID NO: 19870 - protein, 55 aa, Artificial Sequence
  Synthetic polypeptide
DHGALWCNKTWLFWKKSVLHCFETCSCCPVWFPFKSGKYKYSKGPSSAKICCFKE

SEQ ID NO: 19871 - protein, 29 aa, Artificial Sequence
  Synthetic polypeptide
LTNIPKIGSWSFVVQQDLVILEEVSSTLL

SEQ ID NO: 19872 - protein, 185 aa, Artificial Sequence
  Synthetic polypeptide
PTTRTTVVTHQYTKNRIMELCGATRLGYFGRSQFYIALKLVAVAQSGFPLRVESINTVKDLPLPRFVASKNEQESRHAASYSSDSENQGSYSGVIPPPPGRGQVKKGSVSHDTVQPRTSADAQEPASPVVSPQQSPPTSPHTWRKHSRHPSGGNSERPLAGPGPFWSPFGEAQSGNSQTLIKMVH

SEQ ID NO: 19873 - protein, 734 aa, Artificial Sequence
  Synthetic polypeptide
PTTRTTVVTHQYTKNRIMELCGATRLGYFGRSQFYIALKLVAVAQSGFPLRVESINTVKDLPLPRFVASKNEQESRHAASYSSDSENQGSYSGVIPPPPGRGQVKKGSVSHDTVQPRTSADAQEPASPVVSPQQSPPTSPHTWRKHSRHPSGGNSERPLAGPGPFWSPFGEAQSGSSAGDAVWSGHSPPPPQENWVSFADTPPTSTLLTMHPASVQDQTTVRTVASATTAIEIRRQSSSYDDPWKITDEQRQYYVNQFKTIQPDLNGFIPGSAAKEFFTKSKLPILELSHIWELSDFDKDGALTLDEFCAAFHLVVARKNGYDLPEKLPESLMPKLIDLEDSADVGDQPGEVGYSGSPAEAPPSKSPSMPSLNQTWPELNQSSEDTAIVHPVPIRMTPSKIHMQEMELKRTGSDHTNPTSPLLVKPSDLLEENKINSSVKFASGNTVADGYSSSDSFTSDPEQIGSNVTRQRSHSGTSPDNTAPPPPPPRPQPSHSRSSSLDMNRTFTVTTGQQQAGVVAHPPAVPPRPQPSQAPGPAVHRPVDADGLITHTSTSPQQIPEQPNFADFSQFEVFAASNVNDEQDDEAEKHPEVLPAEKASDPASSLRVAKTDSKTEEKTAASAPANVSKGTTPLAPPPKPVRRRLKSEDELRPEVDEHTQKTGVLAAVLASQPSIPRSVGKDKKAIQASIRRNKETNTVLARLNSELQQQLKDVLEERISLEVQLEQLRPFSHL

SEQ ID NO: 19874 - protein, 702 aa, Artificial Sequence
  Synthetic polypeptide
PTTRTTVVTHQYTKNRIMELCGATRLGYFGRSQFYIALKLVAVAQSGFPLRVESINTVKDLPLPRFVASKNEQESRHAASYSSDSENQGSYSGVIPPPPGRGQVKKGSVSHDTVQPRTSADAQEPASPVVSPQQSPPTSPHTWRKHSRHPSGGNSERPLAGPGPFWSPFGEAQSGSSAGDAVWSGHSPPPPQENWVSFADTPPTSTLLTMHPASVQDQTTVRTVASATTAIEIRRQSSSYDDPWKITDEQRQYYVNQFKTIQPDLNGFIPGSAAKEFFTKSKLPILELSHIWELSDFDKDGALTLDEFCAAFHLVVARKNGYDLPEKLPESLMPKLIDLEDSADVGDQPGEVGYSGSPAEAPPSKSPSMPSLNQTWPELNQSSEDTAIVHPVPIRMTPSKIHMQEMELKRTGSDHTNPTSPLLVKPSDLLEENKINSSVKFASGNTVADGYSSSDSFTSDPEQIGSNVTRQRSHSGTSPDNTAPPPPPPRPQPSHSRSSSLDMNRTFTVTTGQQQAGVVAHPPAVPPRPQPSQAPGPAVHRPVDADGLITHTSTSPQQIPEQPNFADFSQFEVFAASNVNDEQDDEAEKHPEVLPSKGTTPLAPPPKPVRRRLKSEDELRPEVDEHTQKTGVLAAVLASQPSIPRSVGKDKKAIQASIRRNKETNTVLARLNSELQQQLKDVLEERISLEVQLEQLRPFSHL

SEQ ID NO: 19875 - protein, 733 aa, Artificial Sequence
  Synthetic polypeptide
PTTRTTVVTHQYTKNRIMELCGATRLGYFGRSQFYIALKLVAVAQSGFPLRVESINTVKDLPLPRFVASKNEQESRHAASYSSDSENQGSYSGVIPPPPGRGQVKKGSVSHDTVQPRTSADAQEPASPVVSPQQSPPTSPHTWRKHSRHPSGGNSERPLAGPGPFWSPFGEAQSGSSAGDAVWSGHSPPPPQENWVSFADTPPTSTLLTMHPASVQDQTTVRTVASATTAIEIRRQSSSYDDPWKITDEQRQYYVNQFKTIQPDLNGFIPGSAAKEFFTKSKLPILELSHIWELSDFDKDGALTLDEFCAAFHLVVARKNGYDLPEKLPESLMPKLIDLEDSADVGDQPGEVGYSGSPAEAPPSKSPSMPSLNQTWPELNQSSEDTAIVHPVPIRMTPSKIHMQEMELKRTGSDHTNPTSPLLVKPSDLLEENKINSSVKFASGNTVDGYSSSDSFTSDPEQIGSNVTRQRSHSGTSPDNTAPPPPPPRPQPSHSRSSSLDMNRTFTVTTGQQQAGVVAHPPAVPPRPQPSQAPGPAVHRPVDADGLITHTSTSPQQIPEQPNFADFSQFEVFAASNVNDEQDDEAEKHPEVLPAEKASDPASSLRVAKTDSKTEEKTAASAPANVSKGTTPLAPPPKPVRRRLKSEDELRPEVDEHTQKTGVLAAVLASQPSIPRSVGKDKKAIQASIRRNKETNTVLARLNSELQQQLKDVLEERISLEVQLEQLRPFSHL

SEQ ID NO: 19876 - protein, 670 aa, Artificial Sequence
  Synthetic polypeptide
PTTRTTVVTHQYTKNRIMELCGATRLGYFGRSQFYIALKLVAVAQSGFPLRVESINTVKDLPLPRFVASKNEQESRHAASYSSDSENQGSYSGVIPPPPGRGQVKKGSVSHDTVQPRTSADAQEPASPVVSPQQSPPTSPHTWRKHSRHPSGGNSERPLAGPGPFWSPFGEAQSGSSAGDAVWSGHSPPPPQENWVSFADTPPTSTLLTMHPASVQDQTTVRTVASATTAIEIRRQSSSYDDPWKITDEQRQYYVNQFKTIQPDLNGFIPGSAAKEFFTKSKLPILELSHIWELSDFDKDGALTLDEFCAAFHLVVARKNGYDLPEKLPESLMPKLIDLEDSADVGDQPGEVGYSGSPAEAPPSKSPSMPSLNQTWPELNQSSEDTAIVHPVPIRMTPSKIHMQEMELKRTGSDHTNPTSPLLVKPSDLLEENKINSSVKFASGNTVGQQQAGVVAHPPAVPPRPQPSQAPGPAVHRPVDADGLITHTSTSPQQIPEQPNFADFSQFEVFAASNVNDEQDDEAEKHPEVLPAEKASDPASSLRVAKTDSKTEEKTAASAPANVSKGTTPLAPPPKPVRRRLKSEDELRPEVDEHTQKTGVLAAVLASQPSIPRSVGKDKKAIQASIRRNKETNTVLARLNSELQQQLKDVLEERISLEVQLEQLRPFSHL

SEQ ID NO: 19877 - protein, 761 aa, Artificial Sequence
  Synthetic polypeptide
PTTRTTVVTHQYTKNRIMELCGATRLGYFGRSQFYIALKLVAVAQSGFPLRVESINTVKDLPLPRFVASKNEQESRHAASYSSDSENQGSYSGVIPPPPGRGQVKKGSVSHDTVQPRTSADAQEPASPVVSPQQSPPTSPHTWRKHSRHPSGGNSERPLAGPGPFWSPFGEAQSGSSAGDAVWSGHSPPPPQENWVSFADTPPTSTLLTMHPASVQDQTTVRTVASATTAIEIRRQSSSYDDPWKITDEQRQYYVNQFKTIQPDLNGFIPGSAAKEFFTKSKLPILELSHIWELSDFDKDGALTLDEFCAAFHLVVARKNGYDLPEKLPESLMPKLIDLEDSADVGDQPGEVGYSGSPAEAPPSKSPSMPSLNQTWPELNQSSEQWETFSERSSSSQTLTQFDSNIAPADPDTAIVHPVPIRMTPSKIHMQEMELKRTGSDHTNPTSPLLVKPSDLLEENKINSSVKFASGNTVADGYSSSDSFTSDPEQIGSNVTRQRSHSGTSPDNTAPPPPPPRPQPSHSRSSSLDMNRTFTVTTGQQQAGVVAHPPAVPPRPQPSQAPGPAVHRPVDADGLITHTSTSPQQIPEQPNFADFSQFEVFAASNVNDEQDDEAEKHPEVLPAEKASDPASSLRVAKTDSKTEEKTAASAPANVSKGTTPLAPPPKPVRRRLKSEDELRPEVDEHTQKTGVLAAVLASQPSIPRSVGKDKKAIQASIRRNKETNTVLARLNSELQQQLKDVLEERISLEVQLEQLRPFSHL

SEQ ID NO: 19878 - protein, 760 aa, Artificial Sequence
  Synthetic polypeptide
PTTRTTVVTHQYTKNRIMELCGATRLGYFGRSQFYIALKLVAVAQSGFPLRVESINTVKDLPLPRFVASKNEQESRHAASYSSDSENQGSYSGVIPPPPGRGQVKKGSVSHDTVQPRTSADAQEPASPVVSPQQSPPTSPHTWRKHSRHPSGGNSERPLAGPGPFWSPFGEAQSGSSAGDAVWSGHSPPPPQENWVSFADTPPTSTLLTMHPASVQDQTTVRTVASATTAIEIRRQSSSYDDPWKITDEQRQYYVNQFKTIQPDLNGFIPGSAAKEFFTKSKLPILELSHIWELSDFDKDGALTLDEFCAAFHLVVARKNGYDLPEKLPESLMPKLIDLEDSADVGDQPGEVGYSGSPAEAPPSKSPSMPSLNQTWPELNQSSEQWETFSERSSSSQTLTQFDSNIAPADPDTAIVHPVPIRMTPSKIHMQEMELKRTGSDHTNPTSPLLVKPSDLLEENKINSSVKFASGNTVDGYSSSDSFTSDPEQIGSNVTRQRSHSGTSPDNTAPPPPPPRPQPSHSRSSSLDMNRTFTVTTGQQQAGVVAHPPAVPPRPQPSQAPGPAVHRPVDADGLITHTSTSPQQIPEQPNFADFSQFEVFAASNVNDEQDDEAEKHPEVLPAEKASDPASSLRVAKTDSKTEEKTAASAPANVSKGTTPLAPPPKPVRRRLKSEDELRPEVDEHTQKTGVLAAVLASQPSIPRSVGKDKKAIQASIRRNKETNTVLARLNSELQQQLKDVLEERISLEVQLEQLRPFSHL

SEQ ID NO: 19879 - protein, 15 aa, Artificial Sequence
  Synthetic polypeptide
LMNTMTYRRKPLPNG

SEQ ID NO: 19880 - protein, 69 aa, Artificial Sequence
  Synthetic polypeptide
PFVWVLFSQPSPTTGERDNGPLLLIPHSDQIPQLQSPAIGLHHQLNLIDEHNDVQKKTFTKWINARFSK

SEQ ID NO: 19881 - protein, 171 aa, Artificial Sequence
  Synthetic polypeptide
PFVWVLFSQPSPTTGERDNGPLLLIPHSDQIPQLQSPAIGLHHQLNLIDEHNDVQKKTFTKWINARFSKSGKPPINDMFTDLKDGRKLLDLLEGLTGTSLPKERGSTRVHALNNVNRVLQVLHQNNVELVNIGGTDIVDGNHKLTLGLLWSIILHWQVKDVMKDVMSDLQQ

SEQ ID NO: 19882 - protein, 3455 aa, Artificial Sequence
  Synthetic polypeptide
PFVWVLFSQPSPTTGERDNGPLLLIPHSDQIPQLQSPAIGLHHQLNLIDEHNDVQKKTFTKWINARFSKSGKPPINDMFTDLKDGRKLLDLLEGLTGTSLPKERGSTRVHALNNVNRVLQVLHQNNVELVNIGGTDIVDGNHKLTLGLLWSIILHWQVKDVMKDVMSDLQQTNSEKILLSWVRQTTRPYSQVNVLNFTTSWTDGLAFNAVLHRHKPDLFSWDKVVKMSPIERLEHAFSKAQTYLGIEKLLDPEDVAVQLPDKKSIIMYLTSLFEVLPQQVTIDAIREVETLPRKYKKECEEEAINIQSTAPEEEHESPRAETPSTVTEVDMDLDSYQIALEEVLTWLLSAEDTFQEQDDISDDVEEVKDQFATHEAFMMELTAHQSSVGSVLQAGNQLITQGTLSDEEEFEIQEQMTLLNARWEALRVESMDRQSRLHDVLMELQKKQLQQLSAWLTLTEERIQKMETCPLDDDVKSLQKLLEEHKSLQSDLEAEQVKVNSLTHMVVIVDENSGESATAILEDQLQKLGERWTAVCRWTEERWNRLQEINILWQELLEEQCLLKAWLTEKEEALNKVQTSNFKDQKELSVSVRRLAILKEDMEMKRQTLDQLSEIGQDVGQLLDNSKASKKINSDSEELTQRWDSLVQRLEDSSNQVTQAVAKLGMSQIPQKDLLETVRVREQAITKKSKQELPPPPPPKKRQIHVDIEAKKKFDAISAELLNWILKWKTAIQTTEIKEYMKMQDTSEMKKKLKALEKEQRERIPRADELNQTGQILVEQMGKEGLPTEEIKNVLEKVSSEWKNVSQHLEDLERKIQLQEDINAYFKQLDELEKVIKTKEEWVKHTSISESSRQSLPSLKDSCQRELTNLLGLHPKIEMARASCSALMSQPSAPDFVQRGFDSFLGRYQAVQEAVEDRQQHLENELKGQPGHAYLETLKTLKDVLNDSENKAQVSLNVLNDLAKVEKALQEKKTLDEILENQKPALHKLAEETKALEKNVHPDVEKLYKQEFDDVQGKWNKLKVLVSKDLHLLEEIALTLRAFEADSTVIEKWMDGVKDFLMKQQAAQGDDAGLQRQLDQCSAFVNEIETIESSLKNMKEIETNLRSGPVAGIKTWVQTRLGDYQTQLEKLSKEIATQKSRLSESQEKAANLKKDLAEMQEWMTQAEEEYLERDFEYKSPEELESAVEEMKRAKEDVLQKEVRVKILKDNIKLLAAKVPSGGQELTSELNVVLENYQLLCNRIRGKCHTLEEVWSCWIELLHYLDLETTWLNTLEERMKSTEVLPEKTDAVNEALESLESVLRHPADNRTQIRELGQTLIDGGILDDIISEKLEAFNSRYEDLSHLAESKQISLEKQLQVLRETDQMLQVLQESLGELDKQLTTYLTDRIDAFQVPQEAQKIQAEISAHELTLEELRRNMRSQPLTSPESRTARGGSQMDVLQRKLREVSTKFQLFQKPANFEQRMLDCKRVLDGVKAELHVLDVKDVDPDVIQTHLDKCMKLYKTLSEVKLEVETVIKTGRHIVQKQQTDNPKGMDEQLTSLKVLYNDLGAQVTEGKQDLERASQLARKMKKEAASLSEWLSATETELVQKSTSEGLLGDLDTEISWAKNVLKDLEKRKADLNTITESSAALQNLIEGSEPILEERLCVLNAGWSRVRTWTEDWCNTLMNHQNQLEIFDGNVAHISTWLYQAEALLDEIEKKPTSKQEEIVKRLVSELDDANLQVENVRDQALILMNARGSSSRELVEPKLAELNRNFEKVSQHIKSAKLLIAQEPLYQCLVTTETFETGVPFSDLEKLENDIENMLKFVEKHLESSDEDEKMDEESAQIEEVLQRGEEMLHQPMEDNKKEKIRLQLLLLHTRYNKIKAIPIQQRKMGQLASGIRSSLLPTDYLVEINKILLCMDDVELSLNVPELNTAIYEDFSFQEDSLKNIKDQLDKLGEQIAVIHEKQPDVILEASGPEAIQIRDTLTQLNAKWDRINRMYSDRKGCFDRAMEEWRQFHCDLNDLTQWITEAEELLVDTCAPGGSLDLEKARIHQQELEVGISSHQPSFAALNRTGDGIVQKLSQADGSFLKEKLAGLNQRWDAIVAEVKDRQPRLKGESKQVMKYRHQLDEIICWLTKAEHAMQKRSTTELGENLQELRDLTQEMEVHAEKLKWLNRTELEMLSDKSLSLPERDKISESLRTVNMTWNKICREVPTTLKECIQEPSSVSQTRIAAHPNVQKVVLVSSASDIPVQSHRTSEISIPADLDKTITELADWLVLIDQMLKSNIVTVGDVEEINKTVSRMKITKADLEQRHPQLDYVFTLAQNLKNKASSSDMRTAITEKLERVKNQWDGTQHGVELRQQQLEDMIIDSLQWDDHREETEELMRKYEARLYILQQARRDPLTKQISDNQILLQELGPGDGIVMAFDNVLQKLLEEYGSDDTRNVKETTEYLKTSWINLKQSIADRQNALEAEWRTVQASRRDLENFLKWIQEAETTVNVLVDASHRENALQDSILARELKQQMQDIQAEIDAHNDIFKSIDGNRQKMVKALGNSEEATMLQHRLDDMNQRWNDLKAKSASIRAHLEASAEKWNRLLMSLEELIKWLNMKDEELKKQMPIGGDVPALQLQYDHCKALRRELKEKEYSVLNAVDQARVFLADQPIEAPEEPRRNLQSKTELTPEERAQKIAKAMRKQSSEVKEKWESLNAVTSNWQKQVDKALEKLRDLQGAMDDLDADMKEAESVRNGWKPVGDLLIDSLQDHIEKIMAFREEIAPINFKVKTVNDLSSQLSPLDLHPSLKMSRQLDDLNMRWKLLQVSVDDRLKQLQEAHRDFGPSSQHFLSTSVQLPWQRSISHNKVPYYINHQTQTTCWDHPKMTELFQSLADLNNVRFSAYRTAIKIRRLQKALCLDLLELSTTNEIFKQHKLNQNDQLLSVPDVINCLTTTYDGLEQMHKDLVNVPLCVDMCLNWLLNVYDTGRTGKIRVQSLKIGLMSLSKGLLEEKYRYLFKEVAGPTEMCDQRQLGLLLHDAIQIPRQLGEVAAFGGSNIEPSVRSCFQQNNNKPEISVKEFIDWMHLEPQSMVWLPVLHRVAAAETAKHQAKCNICKECPIVGFRYRSLKHFNYDVCQSCFFSGRTAKGHKLHYPMVEYCIPTTSGEDVRDFTKVLKNKFRSKKYFAKHPRLGYLPVQTVLEGDNLETPITLISMWPEHYDPSQSPQLFHDDTHSRIEQYATRLAQMERTNGSFLTDSSSTTGSVEDEHALIQQYCQTLGGESPVSQPQSPAQILKSVEREERGELERIIADLEEEQRNLQVEYEQLKDQHLRRGLPVGSPPESIISPHHTSEDSELIAEAKLLRQHKGRLEARMQILEDHNKQLESQLHRLRQLLEQPESDSRINGVSPWASPQHSALSYSLDPDASGPQFHQAAGEDLLAPPHDTSTDLTEVMEQIHSTFPSCCPNVPSRPQAM

SEQ ID NO: 19883 - protein, 591 aa, Artificial Sequence
  Synthetic polypeptide
LSDGWADRDEVIEGYEVEANGGITIKLQSPEVRSFDDYFLKLRLDTNTRNPWFPEFWQHRFQCRLPGHLLENPNFKRICTGNESLEENYVQDSKMGFVINAIYAMAHGLQNMHHALCPGHVGLCDAMKPIDGSKLLDFLIKSSFIGVSGEEVWFDEKGDAPGRYDIMNLQYTEANRYDYVHVGTWHEGVLNIDDYKIQMNKSGVVRSVCSEPCLKGQIKVIRKGEVSCCWICTACKENEYVQDEFTCKACDLGWWPNADLTGCEPIPVRYLEWSNIESIIAIAFSCLGILVTLFVTLIFVLYRDTPVVKSSSRELCYIILAGIFLGYVCPFTLIAKPTTTSCYLQRLLVGLSSAMCYSALVTKTNRIARILAGSKKKICTRKPRFMSAWAQVIIASILISVQLTLVVTLIIMEPPMPILSYPSIKEVYLICNTSNLGVVAPLGYNGLLIMSCTYYAFKTRNVPANFNEAKYIAFTMYTTCIIWLAFVPIYFGSNYKIITTCFAVSLSVTVALGCMFTPKMYIIIAKPERNVRSAFTTSDVVRMHVGDGKLPCRSNTFLNIFRRKKAGAGNAKKRQPEFSPTSQCPSAHVQL

SEQ ID NO: 19884 - protein, 593 aa, Artificial Sequence
  Synthetic polypeptide
LSDGWADRDEVIEGYEVEANGGITIKLQSPEVRSFDDYFLKLRLDTNTRNPWFPEFWQHRFQCRLPGHLLENPNFKRICTGNESLEENYVQDSKMGFVINAIYAMAHGLQNMHHALCPGHVGLCDAMKPIDGSKLLDFLIKSSFIGVSGEEVWFDEKGDAPGRYDIMNLQYTEANRYDYVHVGTWHEGVLNIDDYKIQMNKSGVVRSVCSEPCLKGQIKVIRKGEVSCCWICTACKENEYVQDEFTCKACDLGWWPNADLTGCEPIPVRYLEWSNIESIIAIAFSCLGILVTLFVTLIFVLYRDTPVVKSSSRELCYIILAGIFLGYVCPFTLIAKPTTTSCYLQRLLVGLSSAMCYSALVTKTNRIARILAGSKKKICTRKPRFMSAWAQVIIASILISVQLTLVVTLIIMEPPMPILSYPSIKEVYLICNTSNLGVVAPLGYNGLLIMSCTYYAFKTRNVPANFNEAKYIAFTMYTTCIIWLAFVPIYFGSNYKIITTCFAVSLSVTVALGCMFTPKMYIIIAKPERNVRSAFTTSDVVRMHVGDGKLPCRSNTFLNIFRRKKAGAGNAKWRTGAQGTAYVAPPLCAREDQ

SEQ ID NO: 19885 - protein, 879 aa, Artificial Sequence
  Synthetic polypeptide
LSDGWADRDEVIEGYEVEANGGITIKLQSPEVRSFDDYFLKLRLDTNTRNPWFPEFWQHRFQCRLPGHLLENPNFKRICTGNESLEENYVQDSKMGFVINAIYAMAHGLQNMHHALCPGHVGLCDAMKPIDGSKLLDFLIKSSFIGVSGEEVWFDEKGDAPGRYDIMNLQYTEANRYDYVHVGTWHEGVLNIDDYKIQMNKSGVVRSVCSEPCLKGQIKVIRKGEVSCCWICTACKENEYVQDEFTCKACDLGWWPNADLTGCEPIPVRYLEWSNIESIIAIAFSCLGILVTLFVTLIFVLYRDTPVVKSSSRELCYIILAGIFLGYVCPFTLIAKPTTTSCYLQRLLVGLSSAMCYSALVTKTNRIARILAGSKKKICTRKPRFMSAWAQVIIASILISVQLTLVVTLIIMEPPMPILSYPSIKEVYLICNTSNLGVVAPLGYNGLLIMSCTYYAFKTRNVPANFNEAKYIAFTMYTTCIIWLAFVPIYFGSNYKIITTCFAVSLSVTVALGCMFTPKMYIIIAKPERNVRSAFTTSDVVRMHVGDGKLPCRSNTFLNIFRRKKAGAGNANSNGKSVSWSEPGGGQVPKGQHMWHRLSVHVKTNETACNQTAVIKPLTKSYQGSGKSLTFSDTSTKTLYNVEEEEDAQPIRFSPPGSPSMVVHRRVPSAATTPPLPSHLTAEETPLFLAEPALPKGLPPPLQQQQQPPPQQKSLMDQLQGVVSNFSTAIPDFHAVLAGPGGPGNGLRSLYPPPPPPQHLQMLPLQLSTFGEELVSPPADDDDDSERFKLLQEYVYEHEREGNTEEDELEEEEEDLQAASKLTPDDSPALTPPSPFRDSVASGSSVPSSPVSESVLCTPPNVSYASVILRDYKQSSSTL

SEQ ID NO: 19886 - protein, 23 aa, Artificial Sequence
  Synthetic polypeptide
VMDGQTEMKSLKVMRWKPTGESR

SEQ ID NO: 19887 - protein, 345 aa, Artificial Sequence
  Synthetic polypeptide
HRNRKPHTACSHWPNSDNRRQGGRERLASTNDKGSMAMESAKETRYCAVCNDYASGYHYGVWSCEGCKAFFKRSIQGHNDYMCPATNQCTIDKNRRKSCQACRLRKCYEVGMMKGGFVDLTLHDQVHLLECAWLEILMIGLVWRSMEHPGKLLFAPNLLLDRNQGKCVEGMVEIFDMLLATSSRFRMMNLQGEEFVCLKSIILLNSGVYTFLSSTLKSLEEKDHIHRVLDKITDTLIHLMAKAGLTLQQQHQRLAQLLLILSHIRHMSNKGMEHLYSMKCKNVVPLYDLLLEMLDAHRLHAPTSRGGASVEETDQSHLATAGSTSSHSLQKYYITGEAEGFPATV

SEQ ID NO: 19888 - protein, 457 aa, Artificial Sequence
  Synthetic polypeptide
HRNRKPHTACSHWPNSDNRRQGGRERLASTNDKGSMAMESAKETRYCAVCNDYASGYHYGVWSCEGCKAFFKRSIQGHNDYMCPATNQCTIDKNRRKSCQACRLRKCYEVGMMKGGIRKDRRGGRMLKHKRQRDDGEGRGEVGSAGDMRAANLWPSPLMIKRSKKNSLALSLTADQMVSALLDAEPPILYSEYDPTRPFSEASMMGLLTNLADRELVHMINWAKRVPGFVDLTLHDQVHLLECAWLEILMIGLVWRSMEHPGKLLFAPNLLLDRNQGKCVEGMVEIFDMLLATSSRFRMMNLQGEEFVCLKSIILLNSGVYTFLSSTLKSLEEKDHIHRVLDKITDTLIHLMAKAGLTLQQQHQRLAQLLLILSHIRHMSNKGMEHLYSMKCKNVVPLYDLLLEMLDAHRLHAPTSRGGASVEETDQSHLATAGSTSSHSLQKYYITGEAEGFPATV

SEQ ID NO: 19889 - protein, 86 aa, Artificial Sequence
  Synthetic polypeptide
KDTCTRMFIAALFTIAKTWNQPKCPSMIDWIKKMWHIYTMEYYADIKKDEVMSFAGTWVKLETIILSKLTQEQKTTHCMFSLAKFR

SEQ ID NO: 19890 - protein, 131 aa, Artificial Sequence
  Synthetic polypeptide
SNVLCRDMGEAGNHHSQQTNTGTENHTLHVLTGQIQIIDARVAEKDWPVPMTREVWLWNLPRRLATVQCAMTMLQATIMESGPVRAARPSSREVFKDITTICVQPPTSAPLIKTGGRAARPAGSVNATKWE

SEQ ID NO: 19891 - protein, 169 aa, Artificial Sequence
  Synthetic polypeptide
AQEFESSLGNIVRPCLKQQQQQTHLEASFEEVENNLLHLEDLCGQCELERCKHMQSQQLENYKKNKRKELETFKAELDAEHAQKVLEMEHTQQMKLKERQKFFEEAFQQDMEQYLSTGYLQIAERREPIGSMSSMEVNVDMLEQMDLMDISDQEALDVFLNSGGEENTV

SEQ ID NO: 19892 - protein, 255 aa, Artificial Sequence
  Synthetic polypeptide
AQEFESSLGNIVRPCLKQQQQQTHLEASFEEVENNLLHLEDLCGQCELERCKHMQSQQLENYKKNKRKELETFKAELDAEHAQKVLEMEHTQQMKLKERQKFFEEAFQQDMEQYLSTGYLQIAERREPIGSMSSMEVNVDMLEQMDLMDISDQEALDVFLNSGGEENTVLSPALGPESSTCQNEITLQVPNPSELRAKPPSSSSTCTDSATRDISEGGESPVVQSDEEEVQVDTALATSHTDREATPDGGEDSDS

SEQ ID NO: 19893 - protein, 207 aa, Artificial Sequence
  Synthetic polypeptide
AQEFESSLGNIVRPCLKQQQQQTHLEASFEEVENNLLHLEDLCGQCELERCKHMQSQQLENYKKNKRKELETFKAELDAEHAQKVLEMEHTQQMKLKERQKFFEEAFQQDMEQYLSTGYLQIAERREPIGSMSSMEVNVDMLEQMDLMDISDQEALDVFLNSGGEENTVLSPALGRVDKLALAEPGQYRCHSPPKVRRENHLPVTYA

SEQ ID NO: 19894 - protein, 129 aa, Artificial Sequence
  Synthetic polypeptide
AQEFESSLGNIVRPCLKQQQQQTHLEASFEEVENNLLHLEDLCGQCELERCKHMQSQQLENYKKNKRKELETFKAELDAEHAQKVLEMEHTQQMKLKERQKFFEEAFQQDMEQYLSTGYLQIAERRGDP

SEQ ID NO: 19895 - protein, 256 aa, Artificial Sequence
  Synthetic polypeptide
AQEFESSLGNIVRPCLKQQQQQTHLEASFEEVENNLLHLEDLCGQCELERCKHMQSQQLENYKKNKRKELEVTFRSELDAEHAQKVLEMEHTQQMKLKERQKFFEEAFQQDMEQYLSTGYLQIAERREPIGSMSSMEVNVDMLEQMDLMDISDQEALDVFLNSGGEENTVLSPALGPESSTCQNEITLQVPNPSELRAKPPSSSSTCTDSATRDISEGGESPVVQSDEEEVQVDTALATSHTDREATPDGGEDSDS

SEQ ID NO: 19896 - protein, 12 aa, Artificial Sequence
  Synthetic polypeptide
DLVSNNNNNKLI

SEQ ID NO: 19897 - protein, 24 aa, Artificial Sequence
  Synthetic polypeptide
IQPGQHSETLSQTTTTTNSFRGEF

SEQ ID NO: 19898 - protein, 340 aa, Artificial Sequence
  Synthetic polypeptide
GLPSHDELLKTLSDKSREAKVKSKPRTVPFLPKYSAGLELLSRYEDTWAALHRRAKDCASAGELVDSEVVMLSAHWEKKKTSLVELQEQLQQLPALIADLESMTANLTHLEASFEEVENNLLHLEDLCGQCELERCKHMQSQQLENYKKNKRKELETFKAELDAEHAQKVLEMEHTQQMKLKERQKFFEEAFQQDMEQYLSTGYLQIAERREPIGSMSSMEVNVDMLEQMDLMDISDQEALDVFLNSGGEENTVLSPALGPESSTCQNEITLQVPNPSELRAKPPSSSSTCTDSATRDISEGGESPVVQSDEEEVQVDTALATSHTDREATPDGGEDSDS

SEQ ID NO: 19899 - protein, 292 aa, Artificial Sequence
  Synthetic polypeptide
GLPSHDELLKTLSDKSREAKVKSKPRTVPFLPKYSAGLELLSRYEDTWAALHRRAKDCASAGELVDSEVVMLSAHWEKKKTSLVELQEQLQQLPALIADLESMTANLTHLEASFEEVENNLLHLEDLCGQCELERCKHMQSQQLENYKKNKRKELETFKAELDAEHAQKVLEMEHTQQMKLKERQKFFEEAFQQDMEQYLSTGYLQIAERREPIGSMSSMEVNVDMLEQMDLMDISDQEALDVFLNSGGEENTVLSPALGRVDKLALAEPGQYRCHSPPKVRRENHLPVTYA

SEQ ID NO: 19900 - protein, 341 aa, Artificial Sequence
  Synthetic polypeptide
GLPSHDELLKTLSDKSREAKVKSKPRTVPFLPKYSAGLELLSRYEDTWAALHRRAKDCASAGELVDSEVVMLSAHWEKKKTSLVELQEQLQQLPALIADLESMTANLTHLEASFEEVENNLLHLEDLCGQCELERCKHMQSQQLENYKKNKRKELEVTFRSELDAEHAQKVLEMEHTQQMKLKERQKFFEEAFQQDMEQYLSTGYLQIAERREPIGSMSSMEVNVDMLEQMDLMDISDQEALDVFLNSGGEENTVLSPALGPESSTCQNEITLQVPNPSELRAKPPSSSSTCTDSATRDISEGGESPVVQSDEEEVQVDTALATSHTDREATPDGGEDSDS

SEQ ID NO: 19901 - protein, 197 aa, Artificial Sequence
  Synthetic polypeptide
GLPSHDELLKTLSDKSREAKVKSKPRYEDTWAALHRRAKDCASAGELVDSEVVMLSAHWEKKKTSLVELQEQLQQLPALIADLESMTANLTHLEASFEEVENNLLHLEDLCGQCELERCKHMQSQQLENYKKNKRKELETFKAELDAEHAQKVLEMEHTQQMKLKERQKFFEEAFQQDMEQYLSTGYLQIAERRGDP

SEQ ID NO: 19902 - protein, 33 aa, Artificial Sequence
  Synthetic polypeptide
GLPSHDELLKTLSDKSREAKVKSKPSWLNQEQF

SEQ ID NO: 19903 - protein, 65 aa, Artificial Sequence
  Synthetic polypeptide
LNREGGYLHAVLMIVSSQKIDGFLKGFLPLHSFFSSLPPGKEGCVCSHFHHDCKFPEASQAMMNC

SEQ ID NO: 19904 - protein, 6 aa, Artificial Sequence
  Synthetic polypeptide
TAEDFK

SEQ ID NO: 19905 - protein, 23 aa, Artificial Sequence
  Synthetic polypeptide
GLPSHVELLGLCMILLLNLEIMN

SEQ ID NO: 19906 - protein, 24 aa, Artificial Sequence
  Synthetic polypeptide
LCSFFAFCHDCEASPATWNCSGYV

SEQ ID NO: 19907 - protein, 631 aa, Artificial Sequence
  Synthetic polypeptide
WFYKGQFHCTRSLACHHVRHDFAPSSPSAMIVRPPQPRGTARVMYDFAAEPGNNELTVNEGEIITITNPDVGGGWLEGRNIKGERGLVPTDYVEILPSDGKDQFSCGNSVADQAFLDSLSASTAQASSSAASNNHQVGSGNDPWSAWSASKSGNWESSEGWGAQPEGAGAQRNTNTPNNWDTAFGHPQAYQGPATGDDDDWDEDWDGPKSSSYFKDSESADAGGAQRGNSRASSSSMKIPLNKFPGFAKPGTEQYLLAKQLAKPKEKIPIIVGDYGPMWVYPTSTFDCVVADPRKGSKMYGLKSYIEYQLTPTNTNRSVNHRYKHFDWLYERLLVKFGSAIPIPSLPDKQVTGRFEEEFIKMRMERLQAWMTRMCRHPVISESEVFQQFLNFRDEKEWKTGKRKAERDELAGVMIFSTMEPEAPDLDLVEIEQKCEAVGKFTKAMDDGVKELLTVGQEHWKRCTGPLPKEYQKIGKALQSLATVFSSSGYQGETDLNDAITEAGKTYEEIASLVAEQPKKDLHFLMECNHEYKGFLGCFPDIIGTHKGAIEKVKESDKLVATSKITLQDKQNMVKRVSIMSYALQAEMNHFHSNRIYDYNSVIRLYLEQQVQFYETIAEKLRQALSRFPVM

SEQ ID NO: 19908 - protein, 11 aa, Artificial Sequence
  Synthetic polypeptide
AKERSPFPDGM

SEQ ID NO: 19909 - protein, 15 aa, Artificial Sequence
  Synthetic polypeptide
SQLLGRLSQRKISIS

SEQ ID NO: 19910 - protein, 127 aa, Artificial Sequence
  Synthetic polypeptide
WCTPVVPATREAEPKKDLHFLMECNHEYKGFLGCFPDIIGTHKGAIEKVKESDKLVATSKITLQDKQNMVKRVSIMSYALQAEMNHFHSNRIYDYNSVIRLYLEQQVQFYETIAEKLRQALSRFPVM

SEQ ID NO: 19911 - protein, 29 aa, Artificial Sequence
  Synthetic polypeptide
AEIAPLHSSLGYREPAVARALEAAPGELL

SEQ ID NO: 19912 - protein, 422 aa, Artificial Sequence
  Synthetic polypeptide
DCSEPRSHHCTPAWATGNQLLHVPLRQHQVSCCDWLLKIICGVVTIRTVYASHKQAKACLVSRVSCERTGTRFHTRGVNDDGHVSNFVETEQMIYMDDGVSSFVQIRGSVPLFWEQPGLQVGSHHLRLHRGLEANAPAFDRHMVLLKEQYGQQVVVNLLGSRGGEEVLNRAFKFAKGGKLEKLETLLRPQLKLHWEDFDVFTKGENVSPRFQKGTLRMNCLDCLDRTNTVQSFIALEVLHLQLKTLGLSSKPIVDRFVESFKAMWSLNGHSLSKVFTGSRALEGKAKVGKLKDGARSMSRTIQSNFFDGVKQEAIKLLLVGDVYGEEVADKGGMLLDSTALLVTPRILKAMTERQSEFTNFKRIRIAMGTWNVNGGKQFRSNVLRTAELTDWLLDSPQLSGATDSQGEGSDFGGDKIQLHLT

SEQ ID NO: 19913 - protein, 1306 aa, Artificial Sequence
  Synthetic polypeptide
DCSEPRSHHCTPAWATGNQLLHVPLRQHQVSCCDWLLKIICGVVTIRTVYASHKQAKACLVSRVSCERTGTRFHTRGVNDDGHVSNFVETEQMIYMDDGVSSFVQIRGSVPLFWEQPGLQVGSHHLRLHRGLEANAPAFDRHMVLLKEQYGQQVVVNLLGSRGGEEVLNRAFKKLLWASCHAGDTPMINFDFHQFAKGGKLEKLETLLRPQLKLHWEDFDVFTKGENVSPRFQKGTLRMNCLDCLDRTNTVQSFIALEVLHLQLKTLGLSSKPIVDRFVESFKAMWSLNGHSLSKVFTGSRALEGKAKVGKLKDGARSMSRTIQSNFFDGVKQEAIKLLLVGDVYGEEVADKGGMLLDSTALLVTPRILKAMTERQSEFTNFKRIRIAMGTWNVNGGKQFRSNVLRTAELTDWLLDSPQLSGATDSQDDSSPADIFAVGFEEMVELSAGNIVNASTTNKKMWGEQLQKAISRSHRYILLTSAQLVGVCLYIFVRPYHVPFIRDVAIDTVKTGMGGKAGNKGAVGIRFQFHSTSFCFICSHLTAGQSQVKERNEDYKEITQKLCFPMGRNVFSHDYVFWCGDFNYRIDLTYEEVFYFVKRQDWKKLLEFDQLQLQKSSGKIFKDFHEGAINFGPTYKYDVGSAAYDTSDKCRTPAWTDRVLWWRKKHPFDKTAGELNLLDSDLDVDTKVRHTWSPGALQYYGRAELQASDHRPVLAIVEVEVQEVDVGARERVFQEVSSFQGPLDATVVVNLQSPTLEEKNEFPEDLRTELMQTLGSYGTIVLVRINQGQMLVTFADSHSALSVLDVDGMKVKGRAVKIRPKTKDWLKGLREEIIRKRDSMAPVSPTANSCLLEENFDFTSLDYESEGDILEDDEDYLVDEFNQPGVSDSELGGDDLSDVPGPTALAPPSKSPALTKKKQHPTYKAGLMVKKSASDASISSGTHGQYSILQTARLLPGAPQQPPKARTGISKPYNVKQIKTTNAQEAEAAIRCLLEARGGASEEALSAVAPRDLEASSEPEPTPGAAKPETPQAPPLLPRRPPPRVPAIKKPTLRRTGKPLSPEEQFEQQTVHFTIGPPETSVEAPPVVTAPRVPPVPKPRTFQPGKAAERPSHRKPASDEAPPGAGASVPPPLEAPPLVPKVPPRRKKSAPAAFHLQVLQSNSQLLQGLTYNSSDSPSGHPPAAGTVFPQGDFLSTSSATSPDSDGTKAMKPEAAPLLGDYQDPFWNLLHHPKLLNNTWLSKSSDPLDSGTRSPKRDPIDPVSAGASAAKAELPPDHEHKTLGHWVTISDQEKRTALQVFDPLAKT

SEQ ID NO: 19914 - protein, 1143 aa, Artificial Sequence
  Synthetic polypeptide
DCSEPRSHHCTPAWATGNQLLHVPLRQHQVSCCDWLLKIICGVVTIRTVYASHKQAKACLVSRVSCERTGTRFHTRGVNDDGHVSNFVETEQMIYMDDGVSSFVQIRGSVPLFWEQPGLQVGSHHLRLHRGLEANAPAFDRHMVLLKEQYGQQVVVNLLGSRGGEEVLNRAFKKLLWASCHAGDTPMINFDFHQFAKGGKLEKLETLLRPQLKLHWEDFDVFTKGENVSPRFQKGTLRMNCLDCLDRTNTVQSFIALEVLHLQLKTLGLSSKPIVDRFVESFKAMWSLNGHSLSKVFTGSRALEGKAKVGKLKDGARSMSRTIQSNFFDGVKQEAIKLLLVGDVYGEEVADKGGMLLDSTALLVTPRILKAMTERQSEFTNFKRIRIAMGTWNVNGGKQFRSNVLRTAELTDWLLDSPQLSGATDSQDDSSPADIFAVGFEEMVELSAGNIVNASTTNKKMWGEQLQKAISRSHRYILLTSAQLVGVCLYIFVRPYHVPFIRDVAIDTVKTGMGGKAGNKGAVGIRFQFHSTSFCFICSHLTAGQSQVKERNEDYKEITQKLCFPMGRNVFSHDYVFWCGDFNYRIDLTYEEVFYFVKRQDWKKLLEFDQLQLQKSSGKIFKDFHEGAINFGPTYKYDVGSAAYDTSDKCRTPAWTDRVLWWRKKHPFDKTAGELNLLDSDLDVDTKVRHTWSPGALQYYGRAELQASDHRPVLAIVEVEVQEVDVGARERVFQEVSSFQGPLDATVVVNLQSPTLEEKNEFPEDLRTELMQTLGSYGTIVLVRINQGQMLVTFADSHSALSVLDVDGMKVKGRAVKIRPKTKDWLKGLREEIIRKRDSMAPVSPTANSCLLEENFDFTSLDYESEGDILEDDEDYLVDEFNQPGVSDSELGGDDLSDVPGPTALAPPSKSPALTKKKQHPTYKDDADLVELKRELEAVGEFRHRSPSRSLSVPNRPRPPQPPQRPPPPTGLMVKKSASDASISSGTHGQYSILQTARLLPGAPQQPPKARTGISKPYNVKQIKTTNAQEAEAAIRCLLEARGGASEEALSAVAPRDLEASSEPEPTPGAAKPETPQAPPLLPRRPPPRVPAIKKPTLRRTGKIVFCSRSQASQPCLLLQRHEFVRTVAAQRLASVDTSGSSV

SEQ ID NO: 19915 - protein, 1351 aa, Artificial Sequence
  Synthetic polypeptide
DCSEPRSHHCTPAWATGNQLLHVPLRQHQVSCCDWLLKIICGVVTIRTVYASHKQAKACLVSRVSCERTGTRFHTRGVNDDGHVSNFVETEQMIYMDDGVSSFVQIRGSVPLFWEQPGLQVGSHHLRLHRGLEANAPAFDRHMVLLKEQYGQQVVVNLLGSRGGEEVLNRAFKKLLWASCHAGDTPMINFDFHQFAKGGKLEKLETLLRPQLKLHWEDFDVFTKGENVSPRFQKGTLRMNCLDCLDRTNTVQSFIALEVLHLQLKTLGLSSKPIVDRFVESFKAMWSLNGHSLSKVFTGSRALEGKAKVGKLKDGARSMSRTIQSNFFDGVKQEAIKLLLVGDVYGEEVADKGGMLLDSTALLVTPRILKAMTERQSEFTNFKRIRIAMGTWNVNGGKQFRSNVLRTAELTDWLLDSPQLSGATDSQDDSSPADIFAVGFEEMVELSAGNIVNASTTNKKMWGEQLQKAISRSHRYILLTSAQLVGVCLYIFVRPYHVPFIRDVAIDTVKTGMGGKAGNKGAVGIRFQFHSTSFCFICSHLTAGQSQVKERNEDYKEITQKLCFPMGRNVFSHDYVFWCGDFNYRIDLTYEEVFYFVKRQDWKKLLEFDQLQLQKSSGKIFKDFHEGAINFGPTYKYDVGSAAYDTSDKCRTPAWTDRVLWWRKKHPFDKTAGELNLLDSDLDVDTKVRHTWSPGALQYYGRAELQASDHRPVLAIVEVEVQEVDVGARERVFQEVSSFQGPLDATVVVNLQSPTLEEKNEFPEDLRTELMQTLGSYGTIVLVRINQGQMLVTFADSHSALSVLDVDGMKVKGRAVKIRPKTKDWLKGLREEIIRKRDSMAPVSPTANSCLLEENFDFTSLDYESEGDILEDDEDYLVDEFNQPGVSDSELGGDDLSDVPGPTALAPPSKSPALTKKKQHPTYKDDADLVELKRELEAVGEFRHRSPSRSLSVPNRPRPPQPPQRPPPPTGLMVKKSASDASISSGTHGQYSILQTARLLPGAPQQPPKARTGISKPYNVKQIKTTNAQEAEAAIRCLLEARGGASEEALSAVAPRDLEASSEPEPTPGAAKPETPQAPPLLPRRPPPRVPAIKKPTLRRTGKPLSPEEQFEQQTVHFTIGPPETSVEAPPVVTAPRVPPVPKPRTFQPGKAAERPSHRKPASDEAPPGAGASVPPPLEAPPLVPKVPPRRKKSAPAAFHLQVLQSNSQLLQGLTYNSSDSPSGHPPAAGTVFPQGDFLSTSSATSPDSDGTKAMKPEAAPLLGDYQDPFWNLLHHPKLLNNTWLSKSSDPLDSGTRSPKRDPIDPVSAGASAAKAELPPDHEHKTLGHWVTISDQEKRTALQVFDPLAKT

SEQ ID NO: 19916 - protein, 29 aa, Artificial Sequence
  Synthetic polypeptide
TQEAEIAVSRDRTIALQPGLQGTSCCTCP

SEQ ID NO: 19917 - protein, 39 aa, Artificial Sequence
  Synthetic polypeptide
GRARWLTPVIPALWEAEAGGSRGQEIETILANTVPPKKP

SEQ ID NO: 19918 - protein, 101 aa, Artificial Sequence
  Synthetic polypeptide
HGASEEALSAVAPRDLEASSEPEPTPGAAKPETPQAPPLLPRRPPPRVPAIKKPTLRRTGKIVFCSRSQASQPCLLLQRHEFVRTVAAQRLASVDTSGSSV

SEQ ID NO: 19919 - protein, 309 aa, Artificial Sequence
  Synthetic polypeptide
HGASEEALSAVAPRDLEASSEPEPTPGAAKPETPQAPPLLPRRPPPRVPAIKKPTLRRTGKPLSPEEQFEQQTVHFTIGPPETSVEAPPVVTAPRVPPVPKPRTFQPGKAAERPSHRKPASDEAPPGAGASVPPPLEAPPLVPKVPPRRKKSAPAAFHLQVLQSNSQLLQGLTYNSSDSPSGHPPAAGTVFPQGDFLSTSSATSPDSDGTKAMKPEAAPLLGDYQDPFWNLLHHPKLLNNTWLSKSSDPLDSGTRSPKRDPIDPVSAGASAAKAELPPDHEHKTLGHWVTISDQEKRTALQVFDPLAKT

SEQ ID NO: 19920 - protein, 38 aa, Artificial Sequence
  Synthetic polypeptide
SQHFGRPRRVDHEDRKSRPSWLTRCLRRSPKCRGPKGP

SEQ ID NO: 19921 - protein, 39 aa, Artificial Sequence
  Synthetic polypeptide
DGTWEAPGLMPGPDQCPSYHHGCRAGVCNPAKYNWKTAF

SEQ ID NO: 19922 - protein, 590 aa, Artificial Sequence
  Synthetic polypeptide
SWASFFTSLCLLICKQDPACPPGMPAKMAHGKHLALCLALINVRVTTMDAELEFAIQPNTTGKQLFDQVSAQEVRKENPLQFKFRAKFYPEDVAEELIQDITQKLFFLQVKEGILSDEIYCPPETAVLLGSYAVQAKFGDYNKEVHKSGYLSSERLIPQRVMDQHKLTRDQWEDRIQVWHAEHRGMLKDNAMLEYLKIAQDLEMYGINYFEIKNKKGTDLWLGVDALGLNIYEKDDKLTPKIGFPWSEIRNISFNDKKFVIKPIDKKAPDFVFYAPRLRINKRILQLCMGNHELYMRRRKPDTIEVQQMKAQAREEKHQKQLERQQLETEKKRRETVEREKEQMMREKEELMLRLQDYEEKTKKAERELSEQIQRALQLEEERKRAQEEAERLEADRMAALRAKEELERQAVDQIKSQEQLAAELAEYTAKIALLEEARRRKEDEVEEWQHRAKEAQDDLVKTKEELHLVMTAPPPPPPPVYEPVSYHVQESLQDEGAEPTGYSAELSSEGIRDDRNEEKRITEAEKNERVQRQLLTLSSELSQARDENKRTHNDIIHNENMRQGRDKYKTLRQIRQGNTKQRIDEFEAL

SEQ ID NO: 19923 - protein, 622 aa, Artificial Sequence
  Synthetic polypeptide
SWASFFTSLCLLICKQDPACPPGMPAKMAHGKHLALCLALINVRVTTMDAELEFAIQPNTTGKQLFDQVVKTIGLREVWYFGLHYVDNKGFPTWLKLDKKVSAQEVRKENPLQFKFRAKFYPEDVAEELIQDITQKLFFLQVKEGILSDEIYCPPETAVLLGSYAVQAKFGDYNKEVHKSGYLSSERLIPQRVMDQHKLTRDQWEDRIQVWHAEHRGMLKDNAMLEYLKIAQDLEMYGINYFEIKNKKGTDLWLGVDALGLNIYEKDDKLTPKIGFPWSEIRNISFNDKKFVIKPIDKKAPDFVFYAPRLRINKRILQLCMGNHELYMRRRKPDTIEVQQMKAQAREEKHQKQLERQQLETEKKRRETVEREKEQMMREKEELMLRLQDYEEKTKKAERELSEQIQRALQLEEERKRAQEEAERLEADRMAALRAKEELERQAVDQIKSQEQLAAELAEYTAKIALLEEARRRKEDEVEEWQHRAKEAQDDLVKTKEELHLVMTAPPPPPPPVYEPVSYHVQESLQDEGAEPTGYSAELSSEGIRDDRNEEKRITEAEKNERVQRQLLTLSSELSQARDENKRTHNDIIHNENMRQGRDKYKTLRQIRQGNTKQRIDEFEAL

SEQ ID NO: 19924 - protein, 84 aa, Artificial Sequence
  Synthetic polypeptide
DAVAHACNPALWEAAASRSRGVAPSVEAFDKLMDSMVAEFLKNSRILAGDVETHAEMVHSAFQAQRAFLLMASQYQQPHEANKF

SEQ ID NO: 19925 - protein, 345 aa, Artificial Sequence
  Synthetic polypeptide
DAVAHACNPALWEAAASRSRGVAPSVEAFDKLMDSMVAEFLKNSRILAGDVETHAEMVHSAFQAQRAFLLMASQYQQPHEGPVASTVSAFSVLSSGPGLPPPPPPLPPPGPPPLFENEGKKEESSPSRSALFAQLNQGEAITKGLRHVTDDQKTYKNPSLRAQGGQTQSPTKSHTPSPTSPKSYPSQKHAPVLELEGKKWRVEYQEDRNDLVISETELKQVAYIFKCEKSTIQIKGKVNSIIIDNCKKLGLVFDNVVGIVEVINSQDIQIQVMGRVPTISINKTEGCHIYLSEDALDCEIVSAKSSEMNILIPQDGDYREFPIPEQFKTAWDGSKLITEPAEIMA

SEQ ID NO: 19926 - protein, 393 aa, Artificial Sequence
  Synthetic polypeptide
DAVAHACNPALWEAAASRSRGVAPSVEAFDKLMDSMVAEFLKNSRILAGDVETHAEMVHSAFQAQRAFLLMASQYQQPHENDVAALLKPISEKIQEIQTFRERNRGSNMFNHLSAVSESIPALGWIAVGPVASTVSAFSVLSSGPGLPPPPPPLPPPGPPPLFENEGKKEESSPSRSALFAQLNQGEAITKGLRHVTDDQKTYKNPSLRAQGGQTQSPTKSHTPSPTSPKSYPSQKHAPVLELEGKKWRVEYQEDRNDLVISETELKQVAYIFKCEKSTIQIKGKVNSIIIDNCKKLGLVFDNVVGIVEVINSQDIQIQVMGRVPTISINKTEGCHIYLSEDALDCEIVSAKSSEMNILIPQDGDYREFPIPEQFKTAWDGSKLITEPAEIMA

SEQ ID NO: 19927 - protein, 457 aa, Artificial Sequence
  Synthetic polypeptide
DAVAHACNPALWEAAASRSRGVAPSVEAFDKLMDSMVAEFLKNSRILAGDVETHAEMVHSAFQAQRAFLLMASQYQQPHENDVAALLKPISEKIQEIQTFRERNRGSNMFNHLSAVSESIPALGWIAVSPKPGPYVKEMNDAATFYTNRVLKDYKHSDLRHVDWVKSYLNIWSELQAYIKEHHTTGLTWSKTGPVASTVSAFSVLSSGPGLPPPPPPLPPPGPPPLFENEGKKEESSPSRSALFAQLNQGEAITKGLRHVTDDQKTYKNPSLRAQGGQTQSPTKSHTPSPTSPKSYPSQKHAPVLELEGKKWRVEYQEDRNDLVISETELKQVAYIFKCEKSTIQIKGKVNSIIIDNCKKLGLVFDNVVGIVEVINSQDIQIQVMGRVPTISINKTEGCHIYLSEDALDCEIVSAKSSEMNILIPQDGDYREFPIPEQFKTAWDGSKLITEPAEIMA

SEQ ID NO: 19928 - protein, 197 aa, Artificial Sequence
  Synthetic polypeptide
DAVAHACNPALWEAAASRSRGVAPSVEAFDKLMDSMVAEFLKNSRILAGDVETHEYQEDRNDLVISETELKQVAYIFKCEKSTIQIKGKVNSIIIDNCKKLGLVFDNVVGIVEVINSQDIQIQVMGRVPTISINKTEGCHIYLSEDALDCEIVSAKSSEMNILIPQDGDYREFPIPEQFKTAWDGSKLITEPAEIMA

SEQ ID NO: 19929 - protein, 431 aa, Artificial Sequence
  Synthetic polypeptide
DAVAHACNPALWEAAASRSRGVAPSVEAFDKLMDSMVAEFLKNSRILAGDVETHNDVAALLKPISEKIQEIQTFRERNRGSNMFNHLSAVSESIPALGWIAVSPKPGPYVKEMNDAATFYTNRVLKDYKHSDLRHVDWVKSYLNIWSELQAYIKEHHTTGLTWSKTGPVASTVSAFSVLSSGPGLPPPPPPLPPPGPPPLFENEGKKEESSPSRSALFAQLNQGEAITKGLRHVTDDQKTYKNPSLRAQGGQTQSPTKSHTPSPTSPKSYPSQKHAPVLELEGKKWRVEYQEDRNDLVISETELKQVAYIFKCEKSTIQIKGKVNSIIIDNCKKLGLVFDNVVGIVEVINSQDIQIQVMGRVPTISINKTEGCHIYLSEDALDCEIVSAKSSEMNILIPQDGDYREFPIPEQFKTAWDGSKLITEPAEIMA

SEQ ID NO: 19930 - protein, 174 aa, Artificial Sequence
  Synthetic polypeptide
DAVAHACNPALWEAAASRSRGVAPSVEAFDKLMDSMVAEFLKNSRILAGDVETHNDVAALLKPISEKIQEIQTFRERNRGSNMFNHLSAVSESIPALGWIAVSPKPGPYVKEMNDAATFYTNRVLKDYKHSDLRHVDWVKSYLNIWSELQAYIKEHHTTGLTWSKTNEKRRRQR

SEQ ID NO: 19931 - protein, 21 aa, Artificial Sequence
  Synthetic polypeptide
SSTLGGRGEPITRCGTLRGSL

SEQ ID NO: 19932 - protein, 31 aa, Artificial Sequence
  Synthetic polypeptide
TQWLTPVIQHFGRPRRADHEVWHPPWKPLTS

SEQ ID NO: 19933 - protein, 42 aa, Artificial Sequence
  Synthetic polypeptide
DAVAHACNPALWEAAASRSRGQEIKTILANTVWHPPWKPLTS

SEQ ID NO: 19934 - protein, 65 aa, Artificial Sequence
  Synthetic polypeptide
HGVAPSVEAFDKLMDSMVAEFLKNSRILAGDVETHAEMVHSAFQAQRAFLLMASQYQQPHEANKF

SEQ ID NO: 19935 - protein, 326 aa, Artificial Sequence
  Synthetic polypeptide
HGVAPSVEAFDKLMDSMVAEFLKNSRILAGDVETHAEMVHSAFQAQRAFLLMASQYQQPHEGPVASTVSAFSVLSSGPGLPPPPPPLPPPGPPPLFENEGKKEESSPSRSALFAQLNQGEAITKGLRHVTDDQKTYKNPSLRAQGGQTQSPTKSHTPSPTSPKSYPSQKHAPVLELEGKKWRVEYQEDRNDLVISETELKQVAYIFKCEKSTIQIKGKVNSIIIDNCKKLGLVFDNVVGIVEVINSQDIQIQVMGRVPTISINKTEGCHIYLSEDALDCEIVSAKSSEMNILIPQDGDYREFPIPEQFKTAWDGSKLITEPAEIMA

SEQ ID NO: 19936 - protein, 374 aa, Artificial Sequence
  Synthetic polypeptide
HGVAPSVEAFDKLMDSMVAEFLKNSRILAGDVETHAEMVHSAFQAQRAFLLMASQYQQPHENDVAALLKPISEKIQEIQTFRERNRGSNMFNHLSAVSESIPALGWIAVGPVASTVSAFSVLSSGPGLPPPPPPLPPPGPPPLFENEGKKEESSPSRSALFAQLNQGEAITKGLRHVTDDQKTYKNPSLRAQGGQTQSPTKSHTPSPTSPKSYPSQKHAPVLELEGKKWRVEYQEDRNDLVISETELKQVAYIFKCEKSTIQIKGKVNSIIIDNCKKLGLVFDNVVGIVEVINSQDIQIQVMGRVPTISINKTEGCHIYLSEDALDCEIVSAKSSEMNILIPQDGDYREFPIPEQFKTAWDGSKLITEPAEIMA

SEQ ID NO: 19937 - protein, 438 aa, Artificial Sequence
  Synthetic polypeptide
HGVAPSVEAFDKLMDSMVAEFLKNSRILAGDVETHAEMVHSAFQAQRAFLLMASQYQQPHENDVAALLKPISEKIQEIQTFRERNRGSNMFNHLSAVSESIPALGWIAVSPKPGPYVKEMNDAATFYTNRVLKDYKHSDLRHVDWVKSYLNIWSELQAYIKEHHTTGLTWSKTGPVASTVSAFSVLSSGPGLPPPPPPLPPPGPPPLFENEGKKEESSPSRSALFAQLNQGEAITKGLRHVTDDQKTYKNPSLRAQGGQTQSPTKSHTPSPTSPKSYPSQKHAPVLELEGKKWRVEYQEDRNDLVISETELKQVAYIFKCEKSTIQIKGKVNSIIIDNCKKLGLVFDNVVGIVEVINSQDIQIQVMGRVPTISINKTEGCHIYLSEDALDCEIVSAKSSEMNILIPQDGDYREFPIPEQFKTAWDGSKLITEPAEIMA

SEQ ID NO: 19938 - protein, 178 aa, Artificial Sequence
  Synthetic polypeptide
HGVAPSVEAFDKLMDSMVAEFLKNSRILAGDVETHEYQEDRNDLVISETELKQVAYIFKCEKSTIQIKGKVNSIIIDNCKKLGLVFDNVVGIVEVINSQDIQIQVMGRVPTISINKTEGCHIYLSEDALDCEIVSAKSSEMNILIPQDGDYREFPIPEQFKTAWDGSKLITEPAEIMA

SEQ ID NO: 19939 - protein, 412 aa, Artificial Sequence
  Synthetic polypeptide
HGVAPSVEAFDKLMDSMVAEFLKNSRILAGDVETHNDVAALLKPISEKIQEIQTFRERNRGSNMFNHLSAVSESIPALGWIAVSPKPGPYVKEMNDAATFYTNRVLKDYKHSDLRHVDWVKSYLNIWSELQAYIKEHHTTGLTWSKTGPVASTVSAFSVLSSGPGLPPPPPPLPPPGPPPLFENEGKKEESSPSRSALFAQLNQGEAITKGLRHVTDDQKTYKNPSLRAQGGQTQSPTKSHTPSPTSPKSYPSQKHAPVLELEGKKWRVEYQEDRNDLVISETELKQVAYIFKCEKSTIQIKGKVNSIIIDNCKKLGLVFDNVVGIVEVINSQDIQIQVMGRVPTISINKTEGCHIYLSEDALDCEIVSAKSSEMNILIPQDGDYREFPIPEQFKTAWDGSKLITEPAEIMA

SEQ ID NO: 19940 - protein, 155 aa, Artificial Sequence
  Synthetic polypeptide
HGVAPSVEAFDKLMDSMVAEFLKNSRILAGDVETHNDVAALLKPISEKIQEIQTFRERNRGSNMFNHLSAVSESIPALGWIAVSPKPGPYVKEMNDAATFYTNRVLKDYKHSDLRHVDWVKSYLNIWSELQAYIKEHHTTGLTWSKTNEKRRRQR

SEQ ID NO: 19941 - protein, 39 aa, Artificial Sequence
  Synthetic polypeptide
TQWLTPVIQHFGRPRRADHEVRRSRPSWLTRCGTLRGSL

SEQ ID NO: 19942 - protein, 891 aa, Artificial Sequence
  Synthetic polypeptide
AKSPANIIMTGSNSHITILTLNINGLNSAIKRHRLASWIKSQDPSVSCIQETHLTCRDTHRLKIKGWRKIYQANGKQKKAGVAILVSDKTDFKPTKIKRDKEGHYIMVKGSIQQEELTILNIYAPNTGAPRFIKQVLSDLQRDLDSHTLIMGDFNTPLSTLDRSTRQKVNKDTQELNSALHQADLIDIYRTLHPKSTEYTFFSAPHHTYSKIDHIVGSKALLSKCKRTEIITNYLSDHSAIKLELRIKNLTQSRSTTWKLNNLLLNDYWVHNEMKAEIKMFFETNENKDTTYQNLWDAFKAVCRGKFIALNAYKRKQERSKIDTLTSQLKELEKQEQTHSKASRRQEITKIRAELKEIETQKTLQKINESRSWFFERINKIDRPLARLIKKKREKNQIDTIKNDKGDITTDPTEIQTTIREYYKHLYANKLENLEEMDTFLDTYTLPRLNQEEVESLNRPITGSEIVAIINSLPTKKSPGPDGFTAEFYQRYKEELVPFLLKLFQSIEKEGILPNSFYEASIILIPKPGRDTTKKENFRPISLMNIDAKILNKILANRIQQHIKKLVHHDQVGFIPGMQGWFNIRKSINVIQHINRAKDKNHMIISIDAEKAFDKIQQPFMLKTLNKLGIDGTYFKIIRAIYDKPTANIILNGQKLEAFPLKTGTRQGCPLSPLLFNIVLEVLARAIRQEKEIKGIQLGKEEVKLSLFADDMIVYLENPIVSAQNLLKLISNFSKVSGYKINVQKSQAFLYTNNRQTESQIMGELPFTIASKRIKYLGIQLTRDVKDLFKENYKPLLKEIKEDTNKWKNIPCSWVGRINIVKMAILPKATESIKMLVTLCQSDTEEIRNVASETLLSLGEDGRLAYEQLDKFPRDCVKVGGRHGTEVATAF

SEQ ID NO: 19943 - protein, 15 aa, Artificial Sequence
  Synthetic polypeptide
KWPYCPRLLKALKCW

SEQ ID NO: 19944 - protein, 66 aa, Artificial Sequence
  Synthetic polypeptide
TPIHNCFKENKIPRNPTYKGCEGPLQGELQTTAQGNKRGYKQMEEHSMLMGRKNQYRENGHTAQGY

SEQ ID NO: 19945 - protein, 15 aa, Artificial Sequence
  Synthetic polypeptide
FLHFHLRLLKALKCW

SEQ ID NO: 19946 - protein, 2 aa, Artificial Sequence
  Synthetic polypeptide
GY

SEQ ID NO: 19947 - protein, 95 aa, Artificial Sequence
  Synthetic polypeptide
RRSQDGRIGTAPVYSSQRERRRRRVISAFPSEATESIKMLVTLCQSDTEEIRNVASETLLSLGEDGRLAYEQLDKFPRDCVKVGGRHGTEVATAF

SEQ ID NO: 19948 - protein, 35 aa, Artificial Sequence
  Synthetic polypeptide
DQPGQQSETSSLQKIQKLVSKLFSQAKPHLWQEVS

SEQ ID NO: 19949 - protein, 323 aa, Artificial Sequence
  Synthetic polypeptide
NLISTKDTKISQQIVFSSKTPFVARSLLEKLSRQIQVMEKLAAVSDENIGNISSVVEAIPEFHKKLSLLSFWTKCCSPVGVYHSPADRVMKQLEASFARTVNKEYPGLADPVFRTLVSQILDRAEPLLSSSLSSEVVTVFQYYSYFTSHGVSDLESYLSQLARQVSMVQTLQSLRDEKLLQTMSDLAPSNLLAQQEVLRTLALLLTREDNEVSEAVTLYLAAASKNQHFREKALLYYCEALTKTNLQLQKAACLALKILEATESIKMLVTLCQSDTEEIRNVASETLLSLGEDGRLAYEQLDKFPRDCVKVGGRHGTEVATAF

SEQ ID NO: 19950 - protein, 21 aa, Artificial Sequence
  Synthetic polypeptide
SANCFLKQNPICGKKSLREAF

SEQ ID NO: 19951 - protein, 57 aa, Artificial Sequence
  Synthetic polypeptide
FTTLYPLECQRLKVLSPYIMPSLPCNSANPHQARVNLQLLGDSWRRLQQVSSDDCGN

SEQ ID NO: 19952 - protein, 25 aa, Artificial Sequence
  Synthetic polypeptide
VYYTVSLGMPALKGVKSLHHAEPSL

SEQ ID NO: 19953 - protein, 1327 aa, Artificial Sequence
  Synthetic polypeptide
LWVLTSCRAFLVTARIPTKLELTFSYLEIHGVVCSKSAQMIVETEKCSISMKMASPEDVSEVLAHIGTCLRKIFPGLSPVRIMKKVSMEPSERLASLQALWDSQTVAEQGPCGGFSQMYACVCDWLGFSYREEVQWDVDTIYLTQDTRELNLQDFSHLDHRDLIPIIAALEYNQWFTKLSSKDLKLSTDVCEQILRVVSRSNRLEELVLENAGLRTDFAQKLASALAHNPNSGLHTINLAGNPLEDRGVSSLSIQFAKLPKGLKHLNLSKTSLSPKGVNSLSQSLSANPLTASTLVHLDLSGNVLRGDDLSHMYNFLAQPNAIVHLDLSNTECSLDMVCGALLRGCLQYLAVLNLSRTVFSHRKGKEVPPSFKQFFSSSLALMHINLSGTKLSPEPLKALLLGLACNHNLKGVSLDLSNCELRSGGAQVLEGCIAEIHNITSLDISDNGLESDLSTLIVWLSKNRSIQHLALGKNFNNMKSKNLTPVLDNLVQMIQDEESPLQSLSLADSKLKTEVTIIINALGSNTSLTKVDISGNGMGDMGAKMLAKALQINTKLRTVIWDKNNITAQGFQDIAVAMEKNYTLRFMPIPMYDASQALKTNPEKTEDALQKIENYLLRNHETRKYLQEQAYRLQQGIVTSTTQQMIDRICVKVQDHLNSLRNCGGDAIQEDLKSAERLMRDAKNSKTLLPNLYHVGGASWAGASGLLSSPIQETLESMAGEVTRVVDEQLKALLESMVDAAENLCPNVMKKAHIRQDLIHASTEKISIPRTFVKNVLLEQSGIDILNKISEVKLTVASFLSDRIVDEILDALSHCHHKLADHFSRRGKTLPQQESLEIELAEEKPVKRSIITVEELTEIERLEDLDTCMMTPKSKRKSIHSRMLRPVSRAFEMEFDLDKALEEVPIHIEDPPFPSLRQEKRSSGFISELPSEEGKKLEHFTKLRPKRNKKQQPTQAAVCAANIVSQDGEQNGLMGRVDEGVDEFFTKKVTKMDSKKWSTRGSESHELNEGGDEKKKRDSRKSSGFLNLIKSRSKSERPPTILMTEEPSSPKGAVRSPPVDCPRKDTKAAEHNGNSERIEEIKTPDSFEESQGEEIGKVERSDSKSSPQAGRRYGVQVMGSGLLAEMKAKQEKRAACAQKKLGNDAVSQDSSSPALSGVERSDGGGAVPKLHPGLPENRFGLGTPEKNTKAEPKAEAGSRSRSSSSTPTSPKPLLQSPKPSLAARPVIPQKPRTASRPDDIPDSPSSPKVALLPPVLKKVPSDKERDGQSSPQPSPRTFSQEVSRRSWGQQAQEYQEQKQRSSSKDGHQGSKSNDSGEEAEKEFIFV

SEQ ID NO: 19954 - protein, 14 aa, Artificial Sequence
  Synthetic polypeptide
MFDFGSLHHAEPSL

SEQ ID NO: 19955 - protein, 47 aa, Artificial Sequence
  Synthetic polypeptide
SCLTLGPYIMPSLPCNSANPHQARVNLQLLGDSWRRLQQVSSDDCGN

SEQ ID NO: 19956 - protein, 337 aa, Artificial Sequence; identical to SEQ ID NO: 2378
  Synthetic polypeptide

SEQ ID NO: 19957 - protein, 176 aa, Artificial Sequence; identical to SEQ ID NO: 2983
  Synthetic polypeptide

SEQ ID NO: 19958 - protein, 202 aa, Artificial Sequence; identical to SEQ ID NO: 2858
  Synthetic polypeptide

SEQ ID NO: 19959 - protein, 61 aa, Artificial Sequence; identical to SEQ ID NO: 4655
  Synthetic polypeptide

SEQ ID NO: 19960 - protein, 190 aa, Artificial Sequence
  Synthetic polypeptide
GAEQLRAYLDGTCVEWLRRYLENGKETLQRTDPPKTHMTHHPISDHEATLRCWALGFYPAEITLTWQRDGEDQTQDTELVETRPAGDGTFQKWAAVVVPSGEEQRYTCHVQHEGLPKPLTLRWELSSQPTIPIVGIIAGLVLLGAVITGAVVAAVMWRRKSSDRKGGSYTQAASSDSAQGSDVSLTACKV

SEQ ID NO: 19961 - protein, 196 aa, Artificial Sequence
  Synthetic polypeptide
GAEQLRAYLDGTCVEWLRRYLENGKETLQRTDPPKTHMTHHPISDHEATLRCWALGFYPAEITLTWQRDGEDQTQDTELVETRPAGDGTFQKWAAVVVPSGEEQRYTCHVQHEGLPKPLTLRWELSSQPTIPIVGIIAGLVLLGAVITGAVVAAVMWRRKSSGGEGVKDRKGGSYTQAASSDSAQGSDVSLTACKV

SEQ ID NO: 19962 - protein, 124 aa, Artificial Sequence
  Synthetic polypeptide
GAEQLRAYLDGTCVEWLRRYLENGKETLQRTDPPKTHMTHHPISDHEATLRCWALGFYPAEITLTWQRDGEDQTQDTELVETRPAGDGTFQKWAAVVVPSGEEQRYTCHVQHEGLPKPLTLRWV

SEQ ID NO: 19963 - protein, 43 aa, Artificial Sequence
  Synthetic polypeptide
GGAVESLPGWHVRGVAPQIPGEREGDAAAHGPPQDTYDPPPHL

SEQ ID NO: 19964 - protein, 4 aa, Artificial Sequence
  Synthetic polypeptide
GRSS

SEQ ID NO: 19965 - protein, 32 aa, Artificial Sequence
  Synthetic polypeptide
IGSLLSEESRLEDVMGAGPAQVAKTKQQIEEQ

SEQ ID NO: 19966 - protein, 81 aa, Artificial Sequence
  Synthetic polypeptide
IGSLLSEESRLEDVMGAGPAQVAKTKQQIEEQRVQVQVVERAQQVAVQEQEIARREKELEARVRKPAEAERYKLERLAEAE

SEQ ID NO: 19967 - protein, 207 aa, Artificial Sequence
  Synthetic polypeptide
IGSLLSEESRLEDVMGAGPAQVAKTKQQIEEQRVQVQVVERAQQVAVQEQEIARREKELEARVRKPAEAERYKLERLAEAEKSQLIMQAEAEAASVRMRGEAEAFAIGARARAEAEQMAKKAEAFQLYQEAAQLDMLLEKLPQVAEEISGPLTSANKITLVSSGSGTMGAAKVTGEVLDILTRLPESVERLTGVSISQVNHKPLRTA

SEQ ID NO: 19968 - protein, 15 aa, Artificial Sequence
  Synthetic polypeptide
TRGCDGGWPSTGGQD

SEQ ID NO: 19969 - protein, 18 aa, Artificial Sequence
  Synthetic polypeptide
WGLAQHRWPRLSSRLRSS

SEQ ID NO: 19970 - protein, 62 aa, Artificial Sequence
  Synthetic polypeptide
WGLAQHRWPRLSSRLRSSGCRCRWWSGPSRWQCRSRRSPGGRRSWRPGCGSQRKRSATSWSA

SEQ ID NO: 19971 - protein, 5 aa, Artificial Sequence
  Synthetic polypeptide
AGGQD

SEQ ID NO: 19972 - protein, 14 aa, Artificial Sequence
  Synthetic polypeptide
LSRWPRLSSRLRSS

SEQ ID NO: 19973 - protein, 58 aa, Artificial Sequence
  Synthetic polypeptide
LSRWPRLSSRLRSSGCRCRWWSGPSRWQCRSRRSPGGRRSWRPGCGSQRKRSATSWSA

SEQ ID NO: 19974 - protein, 15 aa, Artificial Sequence
  Synthetic polypeptide
LTKQVAKTKQQIEEQ

SEQ ID NO: 19975 - protein, 64 aa, Artificial Sequence
  Synthetic polypeptide
LTKQVAKTKQQIEEQRVQVQVVERAQQVAVQEQEIARREKELEARVRKPAEAERYKLERLAEAE

SEQ ID NO: 19976 - protein, 190 aa, Artificial Sequence
  Synthetic polypeptide
LTKQVAKTKQQIEEQRVQVQVVERAQQVAVQEQEIARREKELEARVRKPAEAERYKLERLAEAEKSQLIMQAEAEAASVRMRGEAEAFAIGARARAEAEQMAKKAEAFQLYQEAAQLDMLLEKLPQVAEEISGPLTSANKITLVSSGSGTMGAAKVTGEVLDILTRLPESVERLTGVSISQVNHKPLRTA

SEQ ID NO: 19977 - protein, 14 aa, Artificial Sequence
  Synthetic polypeptide
IRTCILTKSQGGQD

SEQ ID NO: 19978 - protein, 34 aa, Artificial Sequence
  Synthetic polypeptide
KYKIAGPGPDQLNQNLHFNKISRWPRLSSRLRSS

SEQ ID NO: 19979 - protein, 78 aa, Artificial Sequence
  Synthetic polypeptide
KYKIAGPGPDQLNQNLHFNKISRWPRLSSRLRSSGCRCRWWSGPSRWQCRSRRSPGGRRSWRPGCGSQRKRSATSWSA

SEQ ID NO: 19980 - protein, 15 aa, Artificial Sequence
  Synthetic polypeptide
QNLKVAKTKQQIEEQ

SEQ ID NO: 19981 - protein, 64 aa, Artificial Sequence
  Synthetic polypeptide
QNLKVAKTKQQIEEQRVQVQVVERAQQVAVQEQEIARREKELEARVRKPAEAERYKLERLAEAE

SEQ ID NO: 19982 - protein, 190 aa, Artificial Sequence
  Synthetic polypeptide
QNLKVAKTKQQIEEQRVQVQVVERAQQVAVQEQEIARREKELEARVRKPAEAERYKLERLAEAEKSQLIMQAEAEAASVRMRGEAEAFAIGARARAEAEQMAKKAEAFQLYQEAAQLDMLLEKLPQVAEEISGPLTSANKITLVSSGSGTMGAAKVTGEVLDILTRLPESVERLTGVSISQVNHKPLRTA

SEQ ID NO: 19983 - protein, 8 aa, Artificial Sequence
  Synthetic polypeptide
KHNEGGQD

SEQ ID NO: 19984 - protein, 30 aa, Artificial Sequence
  Synthetic polypeptide
QYYAFCFCQELVQAESIMKVAKTKQQIEEQ

SEQ ID NO: 19985 - protein, 79 aa, Artificial Sequence
  Synthetic polypeptide
QYYAFCFCQELVQAESIMKVAKTKQQIEEQRVQVQVVERAQQVAVQEQEIARREKELEARVRKPAEAERYKLERLAEAE

SEQ ID NO: 19986 - protein, 205 aa, Artificial Sequence
  Synthetic polypeptide
QYYAFCFCQELVQAESIMKVAKTKQQIEEQRVQVQVVERAQQVAVQEQEIARREKELEARVRKPAEAERYKLERLAEAEKSQLIMQAEAEAASVRMRGEAEAFAIGARARAEAEQMAKKAEAFQLYQEAAQLDMLLEKLPQVAEEISGPLTSANKITLVSSGSGTMGAAKVTGEVLDILTRLPESVERLTGVSISQVNHKPLRTA

SEQ ID NO: 19987 - protein, 12 aa, Artificial Sequence
  Synthetic polypeptide
RWPRLSSRLRSS

SEQ ID NO: 19988 - protein, 56 aa, Artificial Sequence
  Synthetic polypeptide
RWPRLSSRLRSSGCRCRWWSGPSRWQCRSRRSPGGRRSWRPGCGSQRKRSATSWSA

SEQ ID NO: 19989 - protein, 4 aa, Artificial Sequence
  Synthetic polypeptide
LGDL

SEQ ID NO: 19990 - protein, 79 aa, Artificial Sequence
  Synthetic polypeptide
NPFSTTNTKISWEIYKDRQKFSEQVFKVASSDLVNMGISVVSYTLKDIHDDQDYLHSLGKARTAQVQKDARIGEAEAKR

SEQ ID NO: 19991 - protein, 102 aa, Artificial Sequence
  Synthetic polypeptide
NPFSTTNTKISWEIYKDRQKFSEQVFKVASSDLVNMGISVVSYTLKDIHDDQDYLHSLGKARTAQVQKDARIGEAEAKRDAGIREAKAKQEKVSAQYLSEIE

SEQ ID NO: 19992 - protein, 129 aa, Artificial Sequence
  Synthetic polypeptide
NPFSTTNTKISWEIYKDRQKFSEQVFKVASSDLVNMGISVVSYTLKDIHDDQDYLHSLGKARTAQVQKDARIGEAEAKRDAGIREAKAKQEKVSAQYLSEIEMAKAQRDYELKKAAYDIEVNTRRAQAD

SEQ ID NO: 19993 - protein, 146 aa, Artificial Sequence
  Synthetic polypeptide
NPFSTTNTKISWEIYKDRQKFSEQVFKVASSDLVNMGISVVSYTLKDIHDDQDYLHSLGKARTAQVQKDARIGEAEAKRDAGIREAKAKQEKVSAQYLSEIEMAKAQRDYELKKAAYDIEVNTRRAQADLAYQLQVAKTKQQIEEQ

SEQ ID NO: 19994 - protein, 195 aa, Artificial Sequence
  Synthetic polypeptide
NPFSTTNTKISWEIYKDRQKFSEQVFKVASSDLVNMGISVVSYTLKDIHDDQDYLHSLGKARTAQVQKDARIGEAEAKRDAGIREAKAKQEKVSAQYLSEIEMAKAQRDYELKKAAYDIEVNTRRAQADLAYQLQVAKTKQQIEEQRVQVQVVERAQQVAVQEQEIARREKELEARVRKPAEAERYKLERLAEAE

SEQ ID NO: 19995 - protein, 321 aa, Artificial Sequence
  Synthetic polypeptide
NPFSTTNTKISWEIYKDRQKFSEQVFKVASSDLVNMGISVVSYTLKDIHDDQDYLHSLGKARTAQVQKDARIGEAEAKRDAGIREAKAKQEKVSAQYLSEIEMAKAQRDYELKKAAYDIEVNTRRAQADLAYQLQVAKTKQQIEEQRVQVQVVERAQQVAVQEQEIARREKELEARVRKPAEAERYKLERLAEAEKSQLIMQAEAEAASVRMRGEAEAFAIGARARAEAEQMAKKAEAFQLYQEAAQLDMLLEKLPQVAEEISGPLTSANKITLVSSGSGTMGAAKVTGEVLDILTRLPESVERLTGVSISQVNHKPLRTA

SEQ ID NO: 19996 - protein, 70 aa, Artificial Sequence
  Synthetic polypeptide
SQHFGMPRWADHLRSGVRDQPSQPGETPSLLQIQKLAGRSIRTGRNSQNRFSKWPPQTWSTWASVWLATL

SEQ ID NO: 19997 - protein, 78 aa, Artificial Sequence; identical to SEQ ID NO: 4013
  Synthetic polypeptide

SEQ ID NO: 19998 - protein, 101 aa, Artificial Sequence; identical to SEQ ID NO: 3611
  Synthetic polypeptide

SEQ ID NO: 19999 - protein, 128 aa, Artificial Sequence; identical to SEQ ID NO: 3301
  Synthetic polypeptide

SEQ ID NO: 20000 - protein, 145 aa, Artificial Sequence; identical to SEQ ID NO: 3150
  Synthetic polypeptide

SEQ ID NO: 20001 - protein, 194 aa, Artificial Sequence; identical to SEQ ID NO: 2894
  Synthetic polypeptide

SEQ ID NO: 20002 - protein, 320 aa, Artificial Sequence; identical to SEQ ID NO: 2435
  Synthetic polypeptide

SEQ ID NO: 20003 - protein, 35 aa, Artificial Sequence
  Synthetic polypeptide
PTWRSIRTGRNSQNRFSKWPPQTWSTWASVWLATL

SEQ ID NO: 20004 - protein, 27 aa, Artificial Sequence
  Synthetic polypeptide
SQHFGMPRWADHLRSGVRDQPSQPGDL

SEQ ID NO: 20005 - protein, 3 aa, Artificial Sequence
  Synthetic polypeptide
GDL

SEQ ID NO: 20006 - protein, 90 aa, Artificial Sequence
  Synthetic polypeptide
GRAGWFMPVIPALWDAKVGRSLEEIYKDRQKFSEQVFKVASSDLVNMGISVVSYTLKDIHDDQDYLHSLGKARTAQVQKDARIGEAEAKR

SEQ ID NO: 20007 - protein, 113 aa, Artificial Sequence
  Synthetic polypeptide
GRAGWFMPVIPALWDAKVGRSLEEIYKDRQKFSEQVFKVASSDLVNMGISVVSYTLKDIHDDQDYLHSLGKARTAQVQKDARIGEAEAKRDAGIREAKAKQEKVSAQYLSEIE

SEQ ID NO: 20008 - protein, 140 aa, Artificial Sequence
  Synthetic polypeptide
GRAGWFMPVIPALWDAKVGRSLEEIYKDRQKFSEQVFKVASSDLVNMGISVVSYTLKDIHDDQDYLHSLGKARTAQVQKDARIGEAEAKRDAGIREAKAKQEKVSAQYLSEIEMAKAQRDYELKKAAYDIEVNTRRAQAD

SEQ ID NO: 20009 - protein, 157 aa, Artificial Sequence
  Synthetic polypeptide
GRAGWFMPVIPALWDAKVGRSLEEIYKDRQKFSEQVFKVASSDLVNMGISVVSYTLKDIHDDQDYLHSLGKARTAQVQKDARIGEAEAKRDAGIREAKAKQEKVSAQYLSEIEMAKAQRDYELKKAAYDIEVNTRRAQADLAYQLQVAKTKQQIEEQ

SEQ ID NO: 20010 - protein, 206 aa, Artificial Sequence
  Synthetic polypeptide
GRAGWFMPVIPALWDAKVGRSLEEIYKDRQKFSEQVFKVASSDLVNMGISVVSYTLKDIHDDQDYLHSLGKARTAQVQKDARIGEAEAKRDAGIREAKAKQEKVSAQYLSEIEMAKAQRDYELKKAAYDIEVNTRRAQADLAYQLQVAKTKQQIEEQRVQVQVVERAQQVAVQEQEIARREKELEARVRKPAEAERYKLERLAEAE

SEQ ID NO: 20011 - protein, 332 aa, Artificial Sequence
  Synthetic polypeptide
GRAGWFMPVIPALWDAKVGRSLEEIYKDRQKFSEQVFKVASSDLVNMGISVVSYTLKDIHDDQDYLHSLGKARTAQVQKDARIGEAEAKRDAGIREAKAKQEKVSAQYLSEIEMAKAQRDYELKKAAYDIEVNTRRAQADLAYQLQVAKTKQQIEEQRVQVQVVERAQQVAVQEQEIARREKELEARVRKPAEAERYKLERLAEAEKSQLIMQAEAEAASVRMRGEAEAFAIGARARAEAEQMAKKAEAFQLYQEAAQLDMLLEKLPQVAEEISGPLTSANKITLVSSGSGTMGAAKVTGEVLDILTRLPESVERLTGVSISQVNHKPLRTA

SEQ ID NO: 20012 - protein, 46 aa, Artificial Sequence
  Synthetic polypeptide
SQHFGMPRWADHLRRSIRTGRNSQNRFSKWPPQTWSTWASVWLATL

SEQ ID NO: 20013 - protein, 44 aa, Artificial Sequence; identical to SEQ ID NO: 5476
  Synthetic polypeptide

SEQ ID NO: 20014 - protein, 67 aa, Artificial Sequence; identical to SEQ ID NO: 4334
  Synthetic polypeptide

SEQ ID NO: 20015 - protein, 94 aa, Artificial Sequence; identical to SEQ ID NO: 3706
  Synthetic polypeptide

SEQ ID NO: 20016 - protein, 99 aa, Artificial Sequence; identical to SEQ ID NO: 3637
  Synthetic polypeptide

SEQ ID NO: 20017 - protein, 111 aa, Artificial Sequence; identical to SEQ ID NO: 3474
  Synthetic polypeptide

SEQ ID NO: 20018 - protein, 160 aa, Artificial Sequence; identical to SEQ ID NO: 3069
  Synthetic polypeptide

SEQ ID NO: 20019 - protein, 286 aa, Artificial Sequence; identical to SEQ ID NO: 2539
  Synthetic polypeptide

SEQ ID NO: 20020 - protein, 44 aa, Artificial Sequence; identical to SEQ ID NO: 5477
  Synthetic polypeptide

SEQ ID NO: 20021 - protein, 50 aa, Artificial Sequence; identical to SEQ ID NO: 5174
  Synthetic polypeptide

SEQ ID NO: 20022 - protein, 35 aa, Artificial Sequence; identical to SEQ ID NO: 6146
  Synthetic polypeptide

SEQ ID NO: 20023 - protein, 53 aa, Artificial Sequence; identical to SEQ ID NO: 5050
  Synthetic polypeptide

SEQ ID NO: 20024 - protein, 84 aa, Artificial Sequence
  Synthetic polypeptide
GRAGWFMPVIPALWDAKEIYKDRQKFSEQVFKVASSDLVNMGISVVSYTLKDIHDDQDYLHSLGKARTAQVQKDARIGEAEAKR

SEQ ID NO: 20025 - protein, 107 aa, Artificial Sequence
  Synthetic polypeptide
GRAGWFMPVIPALWDAKEIYKDRQKFSEQVFKVASSDLVNMGISVVSYTLKDIHDDQDYLHSLGKARTAQVQKDARIGEAEAKRDAGIREAKAKQEKVSAQYLSEIE

SEQ ID NO: 20026 - protein, 134 aa, Artificial Sequence
  Synthetic polypeptide
GRAGWFMPVIPALWDAKEIYKDRQKFSEQVFKVASSDLVNMGISVVSYTLKDIHDDQDYLHSLGKARTAQVQKDARIGEAEAKRDAGIREAKAKQEKVSAQYLSEIEMAKAQRDYELKKAAYDIEVNTRRAQAD

SEQ ID NO: 20027 - protein, 151 aa, Artificial Sequence
  Synthetic polypeptide
GRAGWFMPVIPALWDAKEIYKDRQKFSEQVFKVASSDLVNMGISVVSYTLKDIHDDQDYLHSLGKARTAQVQKDARIGEAEAKRDAGIREAKAKQEKVSAQYLSEIEMAKAQRDYELKKAAYDIEVNTRRAQADLAYQLQVAKTKQQIEEQ

SEQ ID NO: 20028 - protein, 200 aa, Artificial Sequence
  Synthetic polypeptide
GRAGWFMPVIPALWDAKEIYKDRQKFSEQVFKVASSDLVNMGISVVSYTLKDIHDDQDYLHSLGKARTAQVQKDARIGEAEAKRDAGIREAKAKQEKVSAQYLSEIEMAKAQRDYELKKAAYDIEVNTRRAQADLAYQLQVAKTKQQIEEQRVQVQVVERAQQVAVQEQEIARREKELEARVRKPAEAERYKLERLAEAE

SEQ ID NO: 20029 - protein, 326 aa, Artificial Sequence
  Synthetic polypeptide
GRAGWFMPVIPALWDAKEIYKDRQKFSEQVFKVASSDLVNMGISVVSYTLKDIHDDQDYLHSLGKARTAQVQKDARIGEAEAKRDAGIREAKAKQEKVSAQYLSEIEMAKAQRDYELKKAAYDIEVNTRRAQADLAYQLQVAKTKQQIEEQRVQVQVVERAQQVAVQEQEIARREKELEARVRKPAEAERYKLERLAEAEKSQLIMQAEAEAASVRMRGEAEAFAIGARARAEAEQMAKKAEAFQLYQEAAQLDMLLEKLPQVAEEISGPLTSANKITLVSSGSGTMGAAKVTGEVLDILTRLPESVERLTGVSISQVNHKPLRTA

SEQ ID NO: 20030 - protein, 19 aa, Artificial Sequence
  Synthetic polypeptide
PGRVVHACNPSTLGCQGDL

SEQ ID NO: 20031 - protein, 40 aa, Artificial Sequence
  Synthetic polypeptide
SQHFGMPRRSIRTGRNSQNRFSKWPPQTWSTWASVWLATL

SEQ ID NO: 20032 - protein, 199 aa, Artificial Sequence
  Synthetic polypeptide
EHYPSTDLDFQGDLERCCPHPLRPEGSGAMGPEALSSLLLLLLVASGDADMKGHFDPAKCRYALGMQDRTIPDSDISASSSWSDSTAARHSRLESSDGDGAWCPAGSVFPKEEEYLQVDLQRLHLVALVGTQGRHAGGLGKEFSRSYRLRYSRDGRRWMGWKDRWGQEVISGNEDPEGVVLKDLGPPMVARLVRFYPRA

SEQ ID NO: 20033 - protein, 905 aa, Artificial Sequence
  Synthetic polypeptide
EHYPSTDLDFQGDLERCCPHPLRPEGSGAMGPEALSSLLLLLLVASGDADMKGHFDPAKCRYALGMQDRTIPDSDISASSSWSDSTAARHSRLESSDGDGAWCPAGSVFPKEEEYLQVDLQRLHLVALVGTQGRHAGGLGKEFSRSYRLRYSRDGRRWMGWKDRWGQEVISGNEDPEGVVLKDLGPPMVARLVRFYPRADRVMSVCLRVELYGCLWRDGLLSYTAPVGQTMYLSEAVYLNDSTYDGHTVGGLQYGGLGQLADGVVGLDDFRKSQELRVWPGYDYVGWSNHSFSSGYVEMEFEFDRLRAFQAMQVHCNNMHTLGARLPGGVECRFRRGPAMAWEGEPMRHNLGGNLGDPRARAVSVPLGGRVARFLQCRFLFAGPWLLFSEISFISDVVNNSSPALGGTFPPAPWWPPGPPPTNFSSLELEPRGQQPVAKAEGSPTAILIGCLVAIILLLLLIIALMLWRLHWRRLLSKAERRVLEEELTVHLSVPGDTILINNRPGPREPPPYQEPRPRGNPPHSAPCVPNGSAYSGDYMEPEKPGAPLLPPPPQNSVPHYAEADIVTLQGVTGGNTYAVPALPPGAVGDGPPRVDFPRSRLRFKEKLGEGQFGEVHLCEVDSPQDLVSLDFPLNVRKGHPLLVAVKILRPDATKNARNDFLKEVKIMSRLKDPNIIRLLGVCVQDDPLCMITDYMENGDLNQFLSAHQLEDKAAEGAPGDGQAAQGPTISYPMLLHVAAQIASGMRYLATLNFVHRDLATRNCLVGENFTIKIADFGMSRNLYAGDYYRVQGRAVLPIRWMAWECILMGKFTTASDVWAFGVTLWEVLMLCRAQPFGQLTDEQVIENAGEFFRDQGRQVYLSRPPACPQGLYELMLRCWSRESEQRPPFSQLHRFLAEDALNTV

SEQ ID NO: 20034 - protein, 7 aa, Artificial Sequence
  Synthetic polypeptide
EMLPPPP

SEQ ID NO: 20035 - protein, 62 aa, Artificial Sequence
  Synthetic polypeptide
HESSGVQRPQFENTILALTLTSRVTLRDAAPTPLGPRDQELWDQRPCHLYCCCSWWQVEMLT

SEQ ID NO: 20036 - protein, 26 aa, Artificial Sequence
  Synthetic polypeptide
KCPLSIFQLCSKLILKRKSIQTKMQL

SEQ ID NO: 20037 - protein, 19 aa, Artificial Sequence
  Synthetic polypeptide
KERVFKRKCSCEENAVSST

SEQ ID NO: 20038 - protein, 400 aa, Artificial Sequence
  Synthetic polypeptide
PCAGKSNKSQFKRIVIIKMSSEYISIMFKINFKKKEYSNENAVVKRMQSLQLDCVAVPSSRSNSATEQPGSLHSSQGLGMGPVEESWFAPSLEHPQEENEPSLQSKLQDEANYHLYGSRMDRQTKQQPRQNVAYNREEERRRRVSHDPFAQQRPYENFQNTEGKGTAYSSAASHGNAVHQPSGLTSQPQVLYQNNGLYSSHGFGTRPLDPGTAGPRVWYRPIPSHMPSLHNIPVPETNYLGNTPTMPFSSLPPTDESIKYTIYNSTGIQIGAYNYMEIGGTSSSLLDSTNTNFKEEPAAKYQAIFDNTTSLTDKHLDPIRENLGKHWKNCARKLGFTQSQIDEIDHDYERDGLKEKVYQMLQKWVMREGIKGATVGKLAQALHQCSRIDLLSSLIYVSQN

SEQ ID NO: 20039 - protein, 30 aa, Artificial Sequence
  Synthetic polypeptide
ITLSLLQFSCLDKSASSSDSAQGSDVSLTA

SEQ ID NO: 20040 - protein, 44 aa, Artificial Sequence
  Synthetic polypeptide
VIKLWSPAQLALHELLFLCCNSPVLINRLRLATVPRALMCLSQL

SEQ ID NO: 20041 - protein, 120 aa, Artificial Sequence
  Synthetic polypeptide
AIISPLYLEKGLLKALKVLDNYLTSPLPEEVDETSAEDEGVSQRKFLDGNELTLADCNLLPKLHIVQVVCKKYRGFTIPEAFRGVHRYLSNAYAREEFASTCPDDEEIELAYEQVAKALK

SEQ ID NO: 20042 - protein, 17 aa, Artificial Sequence
  Synthetic polypeptide
PYNFEQSFHLSIWRRDS

SEQ ID NO: 20043 - protein, 59 aa, Artificial Sequence
  Synthetic polypeptide
RIGSCLRTVITLDPDYLSTNPTSRIILSNHFTSLSGEGTPESPEGFRQLLNIPPPRRSG

SEQ ID NO: 20044 - protein, 26 aa, Artificial Sequence
  Synthetic polypeptide
EPGEEGPTAGEGFDKVREAEDSPQHM

SEQ ID NO: 20045 - protein, 73 aa, Artificial Sequence
  Synthetic polypeptide
EPGEEGPTAGSVGGSGLGTLALALGILGGLGTAALLIGVILWQRRQRRGEERKAPENQEEEEERAELNQSEEP

SEQ ID NO: 20046 - protein, 83 aa, Artificial Sequence
  Synthetic polypeptide
EPGEEGPTAGSVGGSGLGTLALALGILGGLGTAALLIGVILWQRRQRRGEERKAPENQEEEEERAELNQSEEPEAGESSTGGP

SEQ ID NO: 20047 - protein, 42 aa, Artificial Sequence
  Synthetic polypeptide
GWARWLTPVIPTLWEAEAGRSPENQARRGQLQALWEDQGWEL

SEQ ID NO: 20048 - protein, 49 aa, Artificial Sequence
  Synthetic polypeptide
GWARWLTPVIPTLWEAEAGRSPENQARRGQLQVRGLIKSGKQKIAPNTC

SEQ ID NO: 20049 - protein, 23 aa, Artificial Sequence
  Synthetic polypeptide
SQHFGRLRRADHLRTRRGGANCR

SEQ ID NO: 20050 - protein, 86 aa, Artificial Sequence
  Synthetic polypeptide
SQHFGRLRRADHLRTRRGGANCRLCGRIRAGNSSPGPGDPGRPGDSRPAHWGHLVAKAATPRRGEEGPRKPGGRGGACRTESVGGT

SEQ ID NO: 20051 - protein, 18 aa, Artificial Sequence
  Synthetic polypeptide
EPAQYIKTTQLTTLPLVV

SEQ ID NO: 20052 - protein, 4 aa, Artificial Sequence
  Synthetic polypeptide
KPLS

SEQ ID NO: 20053 - protein, 237 aa, Artificial Sequence
  Synthetic polypeptide
TCPVHKNHSADHVASCGVNLYQFYGPSGQYTHEFDGDEQFYVDLERKETAWRWPEFSKFGGFDPQGALRNMAVAKHNLNIMIKRYNSTAATNEVPEVTVFSKSPVTLGQPNTLICLVDNIFPPVVNITWLSNGQSVTEGVSETSFLSKSDHSFFKISYLTFLPSADEIYDCKVEHWGLDQPLLKHWEPEIPAPMSELTETVVCALGLSVGLMGIVVGTVFIIQGLRSVGASRHQGPL

SEQ ID NO: 20054 - protein, 196 aa, Artificial Sequence
  Synthetic polypeptide
TCPVHKNHSADHVASCGVNLYQFYGPSGQYTHEFDGDEQFYVDLERKETAWRWPEFSKFGGFDPQGALRNMAVAKHNLNIMIKRYNSTAATNEVPEVTVFSKSPVTLGQPNTLICLVDNIFPPVVNITWLSNGQSVTEGVSETSFLSKSDHSFFKISYLTFLPSADEIYDCKVEHWGLDQPLLKHWGASPSTGAEE

SEQ ID NO: 20055 - protein, 196 aa, Artificial Sequence
  Synthetic polypeptide
GYCDNSASEICKVFRRMPGTTDHVSTYAAFVQTHRPTGEFMFEFDEDEMFYVDLDKKETVWHLEEFGQAFSFEAQGGLANIAILNNNLNTLIQRSNHTQATNDPPEVTVFPKEPVELGQPNTLICHIDKFFPPVLNVTWLCNGELVTEGVAESLFLPRTDYSFHKFHYLTFVPSAEDFYDCRVEHWGLDQPLLKHW

SEQ ID NO: 20056 - protein, 247 aa, Artificial Sequence
  Synthetic polypeptide
GYCDNSASEICKVFRRMPGTTDHVSTYAAFVQTHRPTGEFMFEFDEDEMFYVDLDKKETVWHLEEFGQAFSFEAQGGLANIAILNNNLNTLIQRSNHTQATNDPPEVTVFPKEPVELGQPNTLICHIDKFFPPVLNVTWLCNGELVTEGVAESLFLPRTDYSFHKFHYLTFVPSAEDFYDCRVEHWGLDQPLLKHWEAQEPIQMPETTETVLCALGLVLGLVGIIVGTVLIIKSLRSGHDPRAQGTL

SEQ ID NO: 20057 - protein, 19 aa, Artificial Sequence
  Synthetic polypeptide
KDAWHNGPCVNLCRVCTDA

SEQ ID NO: 20058 - protein, 103 aa, Artificial Sequence
  Synthetic polypeptide
YVTSLHFLTCKMYDMYLLHRVIVTIQRVKYVKYLEGCLAQRTMCQLMPRLYRRIDQQGSLCLNLMKMRCSMWIWTRRRPSGIWRSLAKPFPLRLRAGWLTLLY

SEQ ID NO: 20059 - protein, 27 aa, Artificial Sequence
  Synthetic polypeptide
DQPGQHGAARPRRKALHVLCEDSQPHV

SEQ ID NO: 20060 - protein, 47 aa, Artificial Sequence
  Synthetic polypeptide
GQAQWLMPVIPALWEAEAGGSPEVGSLRPAWPTWCCQTATESAACSV

SEQ ID NO: 20061 - protein, 373 aa, Artificial Sequence
  Synthetic polypeptide
GWEFETSLANMVLPDRDGKRCMFCVKTANRTYEMSASDTRQRQEWTAAIQMAIRLQAEGKTSLHKDLKQKRREQREQRERRRAAKEEELLRLQQLQEEKERKLQELELLQEAQRQAERLLQEEEERRRSQHRELQQALEGQLREAEQARASMQAEMELKEEEAARQRQRIKELEEMQQRLQEALQLEVKARRDEESVRIAQTRLLEEEEEKLKQLMQLKEEQERYIERAQQEKEELQQEMAQQSRSLQQAQQQLEEVRQNRQRADEDVEAAQRKLRQASTNVKHWNVQMNRLMHPIEPGDKRPVTSSSFSGFQPPLLAHRDSSLKRLTRWGSQGNRTPSPNSNEQQKSLNGGDEAPAPASTPQEDKLDPAPEN

SEQ ID NO: 20062 - protein, 952 aa, Artificial Sequence
  Synthetic polypeptide
AAPAQAQIVHAGQACVVKEDNISERVYTIREGDTLMLQCLVTGHPRPQVRWTKTAGSASDKFQETSVFNETLRIERIARTQGGRYYCKAENGVGVPAIKSIRVDVQYLDEPMLTVHQTVSDVRGNFYQEKTVFLRCTVNSNPPARFIWKRGSDTLSHSQDNGVDIYEPLYTQGETKVLKLKNLRPQDYASYTCQVSVRNVCGIPDKAITFRLTNTTAPPALKLSVNETLVVNPGENVTVQCLLTGGDPLPQLQWSHGPGPLPLGALAQGGTLSIPSVQARDSGYYNCTATNNVGNPAKKTVNLLVRSMKNATFQITPDVIKESENIQLGQDLKLSCHVDAVPQEKVTYQWFKNGKPARMSKRLLVTRNDPELPAVTSSLELIDLHFSDYGTYLCMASFPGAPVPDLSVEVNISSETVPPTISVPKGRAVVTVREGSPAELQCEVRGKPRPPVLWSRVDKEAALLPSGLPLEETPDGKLRLERVSRDMSGTYRCQTARYNGFNVRPREAQVQLNVQFPPEVEPSSQDVRQALGRPVLLRCSLLRGSPQRIASAVWRFKGQLLPPPPVVPAAAEAPDHAELRLDAVTRDSSGSYECSVSNDVGSAACLFQVSAKAYSPEFYFDTPNPTRSHKLSKNYSYVLQWTQREPDAVDPVLNYRLSIRQLNQHNAVVKAIPVRRVEKGQLLEYILTDLRVPHSYEVRLTPYTTFGAGDMASRIIHYTEPINSPNLSDNTCHFEDEKICGYTQDLTDNFDWTRQNALTQNPKRSPNTGPPTDISGTPEGYYMFIETSRPRELGDRARLVSPLYNASAKFYCVSFFYHMYGKHIGSLNLLVRSRNKGALDTHAWSLSGNKGNVWQQAHVPISPSGPFQIIFEGVRGPGYLGDIAIDDVTLKKGECPRKQTDPNKGARREGGGGAESGGSCAWRGFLSVEGGCLGLNRGSECLSDGNHVALTV

SEQ ID NO: 20063 - protein, 934 aa, Artificial Sequence
  Synthetic polypeptide
AAPAQAQIVHAGQACVVKEDNISERVYTIREGDTLMLQCLVTGHPRPQVRWTKTAGSASDKFQETSVFNETLRIERIARTQGGRYYCKAENGVGVPAIKSIRVDVQYLDEPMLTVHQTVSDVRGNFYQEKTVFLRCTVNSNPPARFIWKRGSDTLSHSQDNGVDIYEPLYTQGETKVLKLKNLRPQDYASYTCQVSVRNVCGIPDKAITFRLTNTTAPPALKLSVNETLVVNPGENVTVQCLLTGGDPLPQLQWSHGPGPLPLGALAQGGTLSIPSVQARDSGYYNCTATNNVGNPAKKTVNLLVRSMKNATFQITPDVIKESENIQLGQDLKLSCHVDAVPQEKVTYQWFKNGKPARMSKRLLVTRNDPELPAVTSSLELIDLHFSDYGTYLCMASFPGAPVPDLSVEVNISSETVPPTISVPKGRAVVTVREGSPAELQCEVRGKPRPPVLWSRVDKEAALLPSGLPLEETPDGKLRLERVSRDMSGTYRCQTARYNGFNVRPREAQVQLNVQFPPEVEPSSQDVRQALGRPVLLRCSLLRGSPQRIASAVWRFKGQLLPPPPVVPAAAEAPDHAELRLDAVTRDSSGSYECSVSNDVGSAACLFQVSAKAYSPEFYFDTPNPTRSHKLSKNYSYVLQWTQREPDAVDPVLNYRLSIRQLNQHNAVVKAIPVRRVEKGQLLEYILTDLRVPHSYEVRLTPYTTFGAGDMASRIIHYTEPINSPNLSDNTCHFEDEKICGYTQDLTDNFDWTRQNALTQNPKRSPNTGPPTDISGTPEGYYMFIETSRPRELGDRARLVSPLYNASAKFYCVSFFYHMYGKHIGSLNLLVRSRNKGALDTHAWSLSGNKGNVWQQAHVPISPSGPFQIIFEGVRGPGYLGDIAIDDVTLKKGECPRKQTDPNKVVVMPGSGAPCQSSPQLWGPMAIFLLALQR

SEQ ID NO: 20064 - protein, 938 aa, Artificial Sequence
  Synthetic polypeptide
AAPAQAQIVHAGQACVVKEDNISERVYTIREGDTLMLQCLVTGHPRPQVRWTKTAGSASDKFQETSVFNETLRIERIARTQGGRYYCKAENGVGVPAIKSIRVDVQYLDEPMLTVHQTVSDVRGNFYQEKTVFLRCTVNSNPPARFIWKRGSDTLSHSQDNGVDIYEPLYTQGETKVLKLKNLRPQDYASYTCQVSVRNVCGIPDKAITFRLTNTTAPPALKLSVNETLVVNPGENVTVQCLLTGGDPLPQLQWSHGPGPLPLGALAQGGTLSIPSVQARDSGYYNCTATNNVGNPAKKTVNLLVRSMKNATFQITPDVIKESENIQLGQDLKLSCHVDAVPQEKVTYQWFKNGKPARMSKRLLVTRNDPELPAVTSSLELIDLHFSDYGTYLCMASFPGAPVPDLSVEVNISSETVPPTISVPKGRAVVTVREGSPAELQCEVRGKPRPPVLWSRVDKEAALLPSGLPLEETPDGKLRLERVSRDMSGTYRCQTARYNGFNVRPREAQVQLNVQSPCFPPEVEPSSQDVRQALGRPVLLRCSLLRGSPQRIASAVWRFKGQLLPPPPVVPAAAEAPDHAELRLDAVTRDSSGSYECSVSNDVGSAACLFQVSAKAYSPEFYFDTPNPTRSHKLSKNYSYVLQWTQREPDAVDPVLNYRLSIRQLNQHNAVVKAIPVRRVEKGQLLEYILTDLRVPHSYEVRLTPYTTFGAGDMASRIIHYTELLALRTLSSDNTCHFEDEKICGYTQDLTDNFDWTRQNALTQNPKRSPNTGPPTDISGTPEGYYMFIETSRPRELGDRARLVSPLYNASAKFYCVSFFYHMYGKHIGSLNLLVRSRNKGALDTHAWSLSGNKGNVWQQAHVPISPSGPFQIIFEGVRGPGYLGDIAIDDVTLKKGECPRKQTDPNKVVVMPGSGAPCQSSPQLWGPMAIFLLALQR

SEQ ID NO: 20065 - protein, 81 aa, Artificial Sequence
  Synthetic polypeptide
GPGMATPAWHCIQHPAWSPAQQQELGSSSPGADRACGPGMCGERGQYQRACLHHPGGGHPHAAVPCNRAPSTPGTVDQDGR

SEQ ID NO: 20066 - protein, 42 aa, Artificial Sequence
  Synthetic polypeptide
GTRDGHSSLALHPASSMVPGTTAGARQLQPRRRSCMRARHVW

SEQ ID NO: 20067 - protein, 10 aa, Artificial Sequence
  Synthetic polypeptide
LADFGTPSCN

SEQ ID NO: 20068 - protein, 16 aa, Artificial Sequence
  Synthetic polypeptide
TAALTGGLWNSELQLN

SEQ ID NO: 20069 - protein, 159 aa, Artificial Sequence; identical to SEQ ID NO: 3071
  Synthetic polypeptide

SEQ ID NO: 20070 - protein, 259 aa, Artificial Sequence; identical to SEQ ID NO: 2625
  Synthetic polypeptide

SEQ ID NO: 20071 - protein, 243 aa, Artificial Sequence; identical to SEQ ID NO: 2689
  Synthetic polypeptide

SEQ ID NO: 20072 - protein, 234 aa, Artificial Sequence; identical to SEQ ID NO: 2723
  Synthetic polypeptide

SEQ ID NO: 20073 - protein, 38 aa, Artificial Sequence; identical to SEQ ID NO: 5934
  Synthetic polypeptide

SEQ ID NO: 20074 - protein, 116 aa, Artificial Sequence; identical to SEQ ID NO: 3422
  Synthetic polypeptide

SEQ ID NO: 20075 - protein, 154 aa, Artificial Sequence; identical to SEQ ID NO: 3086
  Synthetic polypeptide

SEQ ID NO: 20076 - protein, 19 aa, Artificial Sequence
  Synthetic polypeptide
AYETSFLYKLSNFSWKLTN

SEQ ID NO: 20077 - protein, 47 aa, Artificial Sequence; identical to SEQ ID NO: 5334
  Synthetic polypeptide

SEQ ID NO: 20078 - protein, 157 aa, Artificial Sequence; identical to SEQ ID NO: 3075
  Synthetic polypeptide

SEQ ID NO: 20079 - protein, 32 aa, Artificial Sequence
  Synthetic polypeptide
DMPASPLPSAMIISFLKPPQSCFLYSLQNPGN

SEQ ID NO: 20080 - protein, 165 aa, Artificial Sequence
  Synthetic polypeptide
SLPSHASYTACRTLETDKLALPMSPSPLSPSPIPSPNAKLENSALLTVEPSPQDKNKGFFVDESEPLLRCDSTSSGSSALSRNGSFITKEKKDTVLRQVRLDPCDLQPIFDDMLHFLNPEELRVIEEIPQAEDKLDRLFEIIGVKSQEASQTLLDSVYSHLPDLL

SEQ ID NO: 20081 - protein, 102 aa, Artificial Sequence
  Synthetic polypeptide
YGLGLCPCPNLMLNCNSQCWRWGLVGGDWIMWADFLLWHCSCNRVLTRSDCVKACGTSPYHHCSDHVRHACFPFAFCHDYKFPEASPVMLPIQLAEPWKLTN

SEQ ID NO: 20082 - protein, 18 aa, Artificial Sequence
  Synthetic polypeptide
ILALVHISLGDEGWKLTN

SEQ ID NO: 20083 - protein, 153 aa, Artificial Sequence
  Synthetic polypeptide
RLETDKLALPMSPSPLSPSPIPSPNAKLENSALLTVEPSPQDKNKGFFVDESEPLLRCDSTSSGSSALSRNGSFITKEKKDTVLRQVRLDPCDLQPIFDDMLHFLNPEELRVIEEIPQAEDKLDRLFEIIGVKSQEASQTLLDSVYSHLPDLL

SEQ ID NO: 20084 - protein, 6 aa, Artificial Sequence
  Synthetic polypeptide
VMKAGN

SEQ ID NO: 20085 - protein, 30 aa, Artificial Sequence
  Synthetic polypeptide
CSERYRYPEACSSPSGKPVERYLSVSLQCQ

SEQ ID NO: 20086 - protein, 249 aa, Artificial Sequence
  Synthetic polypeptide
GRQHSAVKGIDILKLVAAQVGSQWKDIYQFLCNASEREVAAFSNGYTADHERAYAALQHWTIRGPEASLAQLISALRQHRRNDVVEKIRGLMEDTTQLETDKLALPMSPSPLSPSPIPSPNAKLENSALLTVEPSPQDKNKGFFVDESEPLLRCDSTSSGSSALSRNGSFITKEKKDTVLRQVRLDPCDLQPIFDDMLHFLNPEELRVIEEIPQAEDKLDRLFEIIGVKSQEASQTLLDSVYSHLPDLL

SEQ ID NO: 20087 - protein, 5 aa, Artificial Sequence
  Synthetic polypeptide
KVSIS

SEQ ID NO: 20088 - protein, 31 aa, Artificial Sequence
  Synthetic polypeptide
NLRLSIYYLSSLCLTKQLMLSYPGLLKQKKN

SEQ ID NO: 20089 - protein, 1713 aa, Artificial Sequence
  Synthetic polypeptide
SLFDQAADAELSWITETEKKLMSLGDIRLEQDQTSAQLQVQKTFTMEILRHKDIIDDLVKSGHKIMTACSEEEKQSMKKKLDKVLKNYDTICQINSERYLQLERAQSLVNQFWETYEELWPWLTETQSIISQLPAPALEYETLRQQQEEHRQLRELIAEHKPHIDKMNKTGPQLLELSPGEGFSIQEKYVAADTLYSQIKEDVKKRAVALDEAISQSTQFHDKIDQILESLERIVERLRQPPSISAEVEKIKEQISENKNVSVDMEKLQPLYETLKQRGEEMIARSGGTDKDISAKAVQDKLDQMVFIWENIHTLVEEREAKLLDVMELAEKFWCDHMSLIVTIKDTQDFIRDLEDPGIDPSVVKQQQEAAETIREEIDGLQEELDIVINLGSELIAACGEPDKPIVKKSIDELNSAWDSLNKAWKDRIDKLEEAMQAAVQYQDGLQAVFDWVDIAGGKLASMSPIGTDLETVKQQIEELKQFKSEAYQQQIEMERLNHQAELLLKKVTEESDKHTVQDPLMELKLIWDSLEERIINRQHKLEGALLALGQFQHALDELLAWLTHTEGLLSEQKPVGGDPKAIEIELAKHHVLQNDVLAHQSTVEAVNKAGNDLIESSAGEEASNLQNKLEVLNQRWQNVLEKTEQRKQQLDGALRQAKGFHGEIEDLQQWLTDTERHLLASKPLGGLPETAKEQLNVHMEVCAAFEAKEETYKSLMQKGQQMLARCPKSAETNIDQDINNLKEKWESVETKLNERKTKLEEALNLAMEFHNSLQDFINWLTQAEQTLNVASRPSLILDTVLFQIDEHKVFANEVNSHREQIIELDKTGTHLKYFSQKQDVVLIKNLLISVQSRWEKVVQRLVERGRSLDDARKRAKQFHEAWSKLMEWLEESEKSLDSELEIANDPDKIKTQLAQHKEFQKSLGAKHSVYDTTNRTGRSLKEKTSLADDNLKLDDMLSELRDKWDTICGKSVERQNKLEEALLFSGQFTDALQALIDWLYRVEPQLAEDQPVHGDIDLVMNLIDNHKAFQKELGKRTSSVQALKRSARELIEGSRDDSSWVKVQMQELSTRWETVCALSISKQTRLEAALRQAEEFHSVVHALLEWLAEAEQTLRFHGVLPDDEDALRTLIDQHKEFMKKLEEKRAELNKATTMGDTVLAICHPDSITTIKHWITIIRARFEEVLAWAKQHQQRLASALAGLIAKQELLEALLAWLQWAETTLTDKDKEVIPQEIEEVKALIAEHQTFMEEMTRKQPDVDKVTKTYKRRAADPSSLQSHIPVLDKGRAGRKRFPASSLYPSGSQTQIETKNPRVNLLLREFANFDFDIWRKKYMRWMNHKKSRVMDFFRRIDKDQDGKITRQEFIDGILSSKFPTSRLEMSAVADIFDRDGDGYIDYYEFVAALHPNKDAYKPITDADKIEDEVTRQVAKCKCAKRFQVEQIGDNKYRVSFQSNFGDSQQLRLVRILRSTVMVRVGGGWMALDEFLVKNDPCRVHHHGSKMLRSESNSSITTTQPTIAKGRTNMELREKFILADGASQGMAAFRPRGRRSRPSSRGASPNRSTSVSSQAAQAASPQVPATTTPKGTPIQGSKLRLPGYLSGKGFHSGEDSGLITTAAARVRTQFADSKKTPSRPGSRAGSKAGSRASSRRGSDASDFDISEIQSVCSDVETVPQTHRPTPRAGSRPSTAKPSKIPTPQRKSPASKLDKSSKR

SEQ ID NO: 20090 - protein, 1753 aa, Artificial Sequence
  Synthetic polypeptide
SLFDQAADAELSWITETEKKLMSLGDIRLEQDQTSAQLQVQKTFTMEILRHKDIIDDLVKSGHKIMTACSEEEKQSMKKKLDKVLKNYDTICQINSERYLQLERAQSLVNQFWETYEELWPWLTETQSIISQLPAPALEYETLRQQQEEHRQLRELIAEHKPHIDKMNKTGPQLLELSPGEGFSIQEKYVAADTLYSQIKEDVKKRAVALDEAISQSTQFHDKIDQILESLERIVERLRQPPSISAEVEKIKEQISENKNVSVDMEKLQPLYETLKQRGEEMIARSGGTDKDISAKAVQDKLDQMVFIWENIHTLVEEREAKLLDVMELAEKFWCDHMSLIVTIKDTQDFIRDLEDPGIDPSVVKQQQEAAETIREEIDGLQEELDIVINLGSELIAACGEPDKPIVKKSIDELNSAWDSLNKAWKDRIDKLEEAMQAAVQYQDGLQAVFDWVDIAGGKLASMSPIGTDLETVKQQIEELKQFKSEAYQQQIEMERLNHQAELLLKKVTEESDKHTVQDPLMELKLIWDSLEERIINRQHKLEGALLALGQFQHALDELLAWLTHTEGLLSEQKPVGGDPKAIEIELAKHHVLQNDVLAHQSTVEAVNKAGNDLIESSAGEEASNLQNKLEVLNQRWQNVLEKTEQRKQQLDGALRQAKGFHGEIEDLQQWLTDTERHLLASKPLGGLPETAKEQLNVHMEVCAAFEAKEETYKSLMQKGQQMLARCPKSAETNIDQDINNLKEKWESVETKLNERKTKLEEALNLAMEFHNSLQDFINWLTQAEQTLNVASRPSLILDTVLFQIDEHKVFANEVNSHREQIIELDKTGTHLKYFSQKQDVVLIKNLLISVQSRWEKVVQRLVERGRSLDDARKRAKQFHEAWSKLMEWLEESEKSLDSELEIANDPDKIKTQLAQHKEFQKSLGAKHSVYDTTNRTGRSLKEKTSLADDNLKLDDMLSELRDKWDTICGKSVERQNKLEEALLFSGQFTDALQALIDWLYRVEPQLAEDQPVHGDIDLVMNLIDNHKAFQKELGKRTSSVQALKRSARELIEGSRDDSSWVKVQMQELSTRWETVCALSISKQTRLEAALRQAEEFHSVVHALLEWLAEAEQTLRFHGVLPDDEDALRTLIDQHKEFMKKLEEKRAELNKATTMGDTVLAICHPDSITTIKHWITIIRARFEEVLAWAKQHQQRLASALAGLIAKQELLEALLAWLQWAETTLTDKDKEVIPQEIEEVKALIAEHQTFMEEMTRKQPDVDKVTKTYKRRAADPSSLQSHIPVLDKGRAGRKRFPASSLYPSGSQTQIETKNPRVNLLVSKWQQVWLLALERRRKLNDALDRLEELREFANFDFDIWRKKYMRWMNHKKSRVMDFFRRIDKDQDGKITRQEFIDGILSSKFPTSRLEMSAVADIFDRDGDGYIDYYEFVAALHPNKDAYKPITDADKIEDEVTRQVAKCKCAKRFQVEQIGDNKYRFFLGNQFGDSQQLRLVRILRSTVMVRVGGGWMALDEFLVKNDPCRAKGRTNMELREKFILADGASQGMAAFRPRGRRSRPSSRGASPNRSTSVSSQAAQAASPQVPATTTPKILHPLTRNYGKPWLTNSKMSTPCKAAECSDFPVPSAEGTPIQGSKLRLPGYLSGKGFHSGEDSGLITTAAARVRTQFADSKKTPSRPGSRAGSKAGSRASSRRGSDASDFDISEIQSVCSDVETVPQTHRPTPRAGSRPSTAKPSKIPTPQRKSPASKLDKSSKR

SEQ ID NO: 20091 - protein, 1740 aa, Artificial Sequence
  Synthetic polypeptide
SLFDQAADAELSWITETEKKLMSLGDIRLEQDQTSAQLQVQKTFTMEILRHKDIIDDLVKSGHKIMTACSEEEKQSMKKKLDKVLKNYDTICQINSERYLQLERAQSLVNQFWETYEELWPWLTETQSIISQLPAPALEYETLRQQQEEHRQLRELIAEHKPHIDKMNKTGPQLLELSPGEGFSIQEKYVAADTLYSQIKEDVKKRAVALDEAISQSTQFHDKIDQILESLERIVERLRQPPSISAEVEKIKEQISENKNVSVDMEKLQPLYETLKQRGEEMIARSGGTDKDISAKAVQDKLDQMVFIWENIHTLVEEREAKLLDVMELAEKFWCDHMSLIVTIKDTQDFIRDLEDPGIDPSVVKQQQEAAETIREEIDGLQEELDIVINLGSELIAACGEPDKPIVKKSIDELNSAWDSLNKAWKDRIDKLEEAMQAAVQYQDGLQAVFDWVDIAGGKLASMSPIGTDLETVKQQIEELKQFKSEAYQQQIEMERLNHQAELLLKKVTEESDKHTVQDPLMELKLIWDSLEERIINRQHKLEGALLALGQFQHALDELLAWLTHTEGLLSEQKPVGGDPKAIEIELAKHHVLQNDVLAHQSTVEAVNKAGNDLIESSAGEEASNLQNKLEVLNQRWQNVLEKTEQRKQQLDGALRQAKGFHGEIEDLQQWLTDTERHLLASKPLGGLPETAKEQLNVHMEVCAAFEAKEETYKSLMQKGQQMLARCPKSAETNIDQDINNLKEKWESVETKLNERKTKLEEALNLAMEFHNSLQDFINWLTQAEQTLNVASRPSLILDTVLFQIDEHKVFANEVNSHREQIIELDKTGTHLKYFSQKQDVVLIKNLLISVQSRWEKVVQRLVERGRSLDDARKRAKQFHEAWSKLMEWLEESEKSLDSELEIANDPDKIKTQLAQHKEFQKSLGAKHSVYDTTNRTGRSLKEKTSLADDNLKLDDMLSELRDKWDTICGKSVERQNKLEEALLFSGQFTDALQALIDWLYRVEPQLAEDQPVHGDIDLVMNLIDNHKAFQKELGKRTSSVQALKRSARELIEGSRDDSSWVKVQMQELSTRWETVCALSISKQTRLEAALRQAEEFHSVVHALLEWLAEAEQTLRFHGVLPDDEDALRTLIDQHKEFMKKLEEKRAELNKATTMGDTVLAICHPDSITTIKHWITIIRARFEEVLAWAKQHQQRLASALAGLIAKQELLEALLAWLQWAETTLTDKDKEVIPQEIEEVKALIAEHQTFMEEMTRKQPDVDKVTKTYKRRAADPSSLQSHIPVLDKGRAGRKRFPASSLYPSGSQTQIETKNPRVNLLVSKWQQVWLLALERRRKLNDALDRLEELREFANFDFDIWRKKYMRWMNHKKSRVMDFFRRIDKDQDGKITRQEFIDGILSSKFPTSRLEMSAVADIFDRDGDGYIDYYEFVAALHPNKDAYKPITDADKIEDEVTRQVAKCKCAKRFQVEQIGDNKYRFFLGNQFGDSQQLRLVRILRSTVMVRVGGGWMALDEFLVKNDPCRVHHHGSKMLRSESNSSITTTQPTIAKGRTNMELREKFILADGASQGMAAFRPRGRRSRPSSRGASPNRSTSVSSQAAQAASPQVPATTTPKGTPIQGSKLRLPGYLSGKGFHSGEDSGLITTAAARVRTQFADSKKTPSRPGSRAGSKAGSRASSRRGSDASDFDISEIQSVCSDVETVPQTHRPTPRAGSRPSTAKPSKIPTPQRKSPASKLDKSSKR

SEQ ID NO: 20092 - protein, 1740 aa, Artificial Sequence
  Synthetic polypeptide
SLFDQAADAELSWITETEKKLMSLGDIRLEQDQTSAQLQVQKTFTMEILRHKDIIDDLVKSGHKIMTACSEEEKQSMKKKLDKVLKNYDTICQINSERYLQLERAQSLVNQFWETYEELWPWLTETQSIISQLPAPALEYETLRQQQEEHRQLRELIAEHKPHIDKMNKTGPQLLELSPGEGFSIQEKYVAADTLYSQIKEDVKKRAVALDEAISQSTQFHDKIDQILESLERIVERLRQPPSISAEVEKIKEQISENKNVSVDMEKLQPLYETLKQRGEEMIARSGGTDKDISAKAVQDKLDQMVFIWENIHTLVEEREAKLLDVMELAEKFWCDHMSLIVTIKDTQDFIRDLEDPGIDPSVVKQQQEAAETIREEIDGLQEELDIVINLGSELIAACGEPDKPIVKKSIDELNSAWDSLNKAWKDRIDKLEEAMQAAVQYQDGLQAVFDWVDIAGGKLASMSPIGTDLETVKQQIEELKQFKSEAYQQQIEMERLNHQAELLLKKVTEESDKHTVQDPLMELKLIWDSLEERIINRQHKLEGALLALGQFQHALDELLAWLTHTEGLLSEQKPVGGDPKAIEIELAKHHVLQNDVLAHQSTVEAVNKAGNDLIESSAGEEASNLQNKLEVLNQRWQNVLEKTEQRKQQLDGALRQAKGFHGEIEDLQQWLTDTERHLLASKPLGGLPETAKEQLNVHMEVCAAFEAKEETYKSLMQKGQQMLARCPKSAETNIDQDINNLKEKWESVETKLNERKTKLEEALNLAMEFHNSLQDFINWLTQAEQTLNVASRPSLILDTVLFQIDEHKVFANEVNSHREQIIELDKTGTHLKYFSQKQDVVLIKNLLISVQSRWEKVVQRLVERGRSLDDARKRAKQFHEAWSKLMEWLEESEKSLDSELEIANDPDKIKTQLAQHKEFQKSLGAKHSVYDTTNRTGRSLKEKTSLADDNLKLDDMLSELRDKWDTICGKSVERQNKLEEALLFSGQFTDALQALIDWLYRVEPQLAEDQPVHGDIDLVMNLIDNHKAFQKELGKRTSSVQALKRSARELIEGSRDDSSWVKVQMQELSTRWETVCALSISKQTRLEAALRQAEEFHSVVHALLEWLAEAEQTLRFHGVLPDDEDALRTLIDQHKEFMKKLEEKRAELNKATTMGDTVLAICHPDSITTIKHWITIIRARFEEVLAWAKQHQQRLASALAGLIAKQELLEALLAWLQWAETTLTDKDKEVIPQEIEEVKALIAEHQTFMEEMTRKQPDVDKVTKTYKRRAADPSSLQSHIPVLDKGRAGRKRFPASSLYPSGSQTQIETKNPRVNLLVSKWQQVWLLALERRRKLNDALDRLEELREFANFDFDIWRKKYMRWMNHKKSRVMDFFRRIDKDQDGKITRQEFIDGILSSKFPTSRLEMSAVADIFDRDGDGYIDYYEFVAALHPNKDAYKPITDADKIEDEVTRQVAKCKCAKRFQVEQIGDNKYRVSFQSNFGDSQQLRLVRILRSTVMVRVGGGWMALDEFLVKNDPCRVHHHGSKMLRSESNSSITTTQPTIAKGRTNMELREKFILADGASQGMAAFRPRGRRSRPSSRGASPNRSTSVSSQAAQAASPQVPATTTPKGTPIQGSKLRLPGYLSGKGFHSGEDSGLITTAAARVRTQFADSKKTPSRPGSRAGSKAGSRASSRRGSDASDFDISEIQSVCSDVETVPQTHRPTPRAGSRPSTAKPSKIPTPQRKSPASKLDKSSKR

SEQ ID NO: 20093 - protein, 4 aa, Artificial Sequence
  Synthetic polypeptide
VVFV

SEQ ID NO: 20094 - protein, 25 aa, Artificial Sequence
  Synthetic polypeptide
PLISDIHVTGESEDMSAKERLLLWT

SEQ ID NO: 20095 - protein, 46 aa, Artificial Sequence
  Synthetic polypeptide
PLISDIHVTGESEDMSAKERLLLWTQQATEGYAGIRCENFTTCWRD

SEQ ID NO: 20096 - protein, 375 aa, Artificial Sequence
  Synthetic polypeptide
PLISDIHVTGESEDMSAKERLLLWTQQATEGYAGIRCENFTTCWRDGKLFNAIIHKYRPDLIDMNTVAVQSNLANLEHAFYVAEKIGVIRLLDPEDVDVSSPDEKSVITYVSSLYDAFPKVPEGGEGIGANDVEVKWIEYQNMVNYLIQWIRHHVTTMSERTFPNNPVELKALYNQYLQFKETEIPPKETEKSKIKRLYKLLEIWIEFGRIKLLQGYHPNDIEKEWGKLIIAMLEREKALRPEVERLEMLQQIANRVQRDSVICEDKLILAGNALQSDSKRLESGVQFQNEAEIAGYILECENLLRQHVIDVQILIDGKYYQADQLVQRVAKLRDEIMALRNECSSVYSKGRILTTEQTKLMISGITQSLNSGFA

SEQ ID NO: 20097 - protein, 1303 aa, Artificial Sequence
  Synthetic polypeptide
PLISDIHVTGESEDMSAKERLLLWTQQATEGYAGIRCENFTTCWRDGKLFNAIIHKYRPDLIDMNTVAVQSNLANLEHAFYVAEKIGVIRLLDPEDVDVSSPDEKSVITYVSSLYDAFPKVPEGGEGIGANDVEVKWIEYQNMVNYLIQWIRHHVTTMSERTFPNNPVELKALYNQYLQFKETEIPPKETEKSKIKRLYKLLEIWIEFGRIKLLQGYHPNDIEKEWGKLIIAMLEREKALRPEVERLEMLQQIANRVQRDSVICEDKLILAGNALQSDSKRLESGVQFQNEAEIAGYILECENLLRQHVIDVQILIDGKYYQADQLVQRVAKLRDEIMALRNECSSVYSKGRILTTEQTKLMISGITQSLNSGFAQTLHPSLTSGLTQSLTPSLTSSSMTSGLSSGMTSRLTPSVTPAYTPGFPSGLVPNFSSGVEPNSLQTLKLMQIRKPLLKSSLLDQNLTEEEINMKFVQDLLNWVDEMQVQLDRTEWGSDLPSVESHLENHKNVHRAIEEFESSLKEAKISEIQMTAPLKLTYAEKLHRLESQYAKLLNTSRNQERHLDTLHNFVSRATNELIWLNEKEEEEVAYDWSERNTNIARKKDYHAELMRELDQKEENIKSVQEIAEQLLLENHPARLTIEAYRAAMQTQWSWILQLCQCVEQHIKENTAYFEFFNDAKEATDYLRNLKDAIQRKYSCDRSSSIHKLEDLVQESMEEKEELLQYKSTIANLMGKAKTIIQLKPRNSDCPLKTSIPIKAICDYRQIEITIYKDDECVLANNSHRAKWKVISPTGNEAMVPSVCFTVPPPNKEAVDLANRIEQQYQNVLTLWHESHINMKSVVSWHYLINEIDRIRASNVASIKTMLPGEHQQVLSNLQSRFEDFLEDSQESQVFSGSDITQLEKEVNVCKQYYQELLKSAEREEQEESVYNLYISEVRNIRLRLENCEDRLIRQIRTPLERDDLHESVFRITEQEKLKKELERLKDDLGTITNKCEEFFSQAAASSSVPTLRSELNVVLQNMNQVYSMSSTYIDKLKTVNLVLKNTQAAEALVKLYETKLCEEEAVIADKNNIENLISTLKQWRSEVDEKRQVFHALEDELQKAKAISDEMFKTYKERDLDFDWHKEKADQLVERWQNVHVQIDNRLRDLEGIGKSLKYYRDTYHPLDDWIQQVETTQRKIQENQPENSKTLATQLNQQKMLVSEIEMKQSKMDECQKYAEQYSATVKDYELQTMTYRAMVDSQQKSPVKRRRMQSSADLIIQEFMDLRTRYTALVTLMTQYIKFAGDSLKRLEEEEKSLEEEK

SEQ ID NO: 20098 - protein, 5321 aa, Artificial Sequence
  Synthetic polypeptide
PLISDIHVTGESEDMSAKERLLLWTQQATEGYAGIRCENFTTCWRDGKLFNAIIHKYRPDLIDMNTVAVQSNLANLEHAFYVAEKIGVIRLLDPEDVDVSSPDEKSVITYVSSLYDAFPKVPEGGEGIGANDVEVKWIEYQNMVNYLIQWIRHHVTTMSERTFPNNPVELKALYNQYLQFKETEIPPKETEKSKIKRLYKLLEIWIEFGRIKLLQGYHPNDIEKEWGKLIIAMLEREKALRPEVERLEMLQQIANRVQRDSVICEDKLILAGNALQSDSKRLESGVQFQNEAEIAGYILECENLLRQHVIDVQILIDGKYYQADQLVQRVAKLRDEIMALRNECSSVYSKGRILTTEQTKLMISGITQSLNSGFAQTLHPSLTSGLTQSLTPSLTSSSMTSGLSSGMTSRLTPSVTPAYTPGFPSGLVPNFSSGVEPNSLQTLKLMQIRKPLLKSSLLDQNLTEEEINMKFVQDLLNWVDEMQVQLDRTEWGSDLPSVESHLENHKNVHRAIEEFESSLKEAKISEIQMTAPLKLTYAEKLHRLESQYAKLLNTSRNQERHLDTLHNFVSRATNELIWLNEKEEEEVAYDWSERNTNIARKKDYHAELMRELDQKEENIKSVQEIAEQLLLENHPARLTIEAYRAAMQTQWSWILQLCQCVEQHIKENTAYFEFFNDAKEATDYLRNLKDAIQRKYSCDRSSSIHKLEDLVQESMEEKEELLQYKSTIANLMGKAKTIIQLKPRNSDCPLKTSIPIKAICDYRQIEITIYKDDECVLANNSHRAKWKVISPTGNEAMVPSVCFTVPPPNKEAVDLANRIEQQYQNVLTLWHESHINMKSVVSWHYLINEIDRIRASNVASIKTMLPGEHQQVLSNLQSRFEDFLEDSQESQVFSGSDITQLEKEVNVCKQYYQELLKSAEREEQEESVYNLYISEVRNIRLRLENCEDRLIRQIRTPLERDDLHESVFRITEQEKLKKELERLKDDLGTITNKCEEFFSQAAASSSVPTLRSELNVVLQNMNQVYSMSSTYIDKLKTVNLVLKNTQAAEALVKLYETKLCEEEAVIADKNNIENLISTLKQWRSEVDEKRQVFHALEDELQKAKAISDEMFKTYKERDLDFDWHKEKADQLVERWQNVHVQIDNRLRDLEGIGKSLKYYRDTYHPLDDWIQQVETTQRKIQENQPENSKTLATQLNQQKMLVSEIEMKQSKMDECQKYAEQYSATVKDYELQTMTYRAMVDSQQKSPVKRRRMQSSADLIIQEFMDLRTRYTALVTLMTQYIKFAGDSLKRLEEEEKSLEEEKKEHVEKAKELQKWVSNISKTLKDAEKAGKPPFSKQKISSEEISTKKEQLSEALQTIQLFLAKHGDKMTDEERNELEKQVKTLQESYNLLFSESLKQLQESQTSGDVKVEEKIVAERQQEYKEKLQGICDLLTQTENRLIGHQEAFMIGDGTVELKKYQSKQEELQKDMQGSAQALAEVVKNTENFLKENGEKLSQEDKALIEQKLNEAKIKCEQLNLKAEQSKKELDKVVTTAIKEETEKVAAVKQLEESKTKIENLLDWLSNVDKDSERAGTKHKQVIEQNGTHFQEGDGKSAIGEEDEVNGNLLETDVDGQVGTTQENLNQQYQKVKAQHEKIISQHQAVIIATQSAQVLLEKQGQYLSPEEKEKLQKNMKELKVHYETALAESEKKMKLTHSLQEELEKFDADYTEFEHWLQQSEQELENLEAGADDINGLMTKLKRQKSFSEDVISHKGDLRYITISGNRVLEAAKSCSKRDGGKVDTSATHREVQRKLDHATDRFRSLYSKCNVLGNNLKDLVDKYQHYEDASCGLLAGLQACEATASKHLSEPIAVDPKNLQRQLEETKALQGQISSQQVAVEKLKKTAEVLLDARGSLLPAKNDIQKTLDDIVGRYEDLSKSVNERNEKLQITLTRSLSVQDGLDEMLDWMGNVESSLKEQGQVPLNSTALQDIISKNIMLEQDIAGRQSSINAMNEKVKKFMETTDPSTASSLQAKMKDLSARFSEASHKHKETLAKMEELKTKVELFENLSEKLQTFLETKTQALTEVDVPGKDVTELSQYMQESTSEFLEHKKHLEVLHSLLKEISSHGLPSDKALVLEKTNNLSKKFKEMEDTIKEKKEAVTSCQEQLDAFQVLVKSLKSWIKETTKKVPIVQPSFGAEDLGKSLEDTKKLQEKWSLKTPEIQKVNNSGISLCNLISAVTTPAKAIAAVKSGGAVLNGEGTATNTEEFWANKGLTSIKKDMTDISHGYEDLGLLLKDKIAELNTKLSKLQKAQEESSAMMQWLQKMNKTATKWQQTPAPTDTEAVKTQVEQNKSFEAELKQNVNKVQELKDKLTELLEENPDTPEAPRWKQMLTEIDSKWQELNQLTIDRQQKLEESSNNLTQFQTVEAQLKQWLVEKELMVSVLGPLSIDPNMLNTQRQQVQILLQEFATRKPQYEQLTAAGQGILSRPGEDPSLRGIVKEQLAAVTQKWDSLTGQLSDRCDWIDQAIVKSTQYQSLLRSLSDKLSDLDNKLSSSLAVSTHPDAMNQQLETAQKMKQEIQQEKKQIKVAQALCEDLSALVKEEYLKAELSRQLEGILKSFKDVEQKAENHVQHLQSACASSHQFQQMSRDFQAWLDTKKEEQNKSHPISAKLDVLESLIKDHKDFSKTLTAQSHMYEKTIAEGENLLLKTQGSEKAALQLQLNTIKTNWDTFNKQVKERENKLKESLEKALKYKEQVETLWPWIDKCQNNLEEIKFCLDPAEGENSIAKLKSLQKEMDQHFGMVELLNNTANSLLSVCEIDKEVVTDENKSLIQKVDMVTEQLHSKKFCLENMTQKFKEFQEVSKESKRQLQCAKEQLDIHDSLGSQAYSNKYLTMLQTQQKSLQALKHQVDLAKRLAQDLVVEASDSKGTSDVLLQVETIAQEHSTLSQQVDEKCSFLETKLQGIGHFQNTIREMFSQFAEFDDELDSMAPVGRDAETLQKQKETIKAFLKKLEALMASNDNANKTCKMMLATEETSPDLVGIKRDLEALSKQCNKLLDRAQAREEQVEGTIKRLEEFYSKLKEFSILLQKAEEHEESQGPVGMETETINQQLNMFKVFQKEEIEPLQGKQQDVNWLGQGLIQSAAKSTSTQGLEHDLDDVNARWKTLNKKVAQRAAQLQEALLHCGRFQDALESLLSWMVDTEELVANQKPPSAEFKVVKAQIQEQKLLQRLLDDRKSTVEVIKREGEKIATTAEPADKVKILKQLSLLDSRWEALLNKAETRNRQLEGISVVAQQFHETLEPLNEWLTTIEKRLVNCEPIGTQASKLEEQIAQHKALEDDIINHNKHLHQAVSIGQSLKVLSSREDKDMVQSKLDFSQVWYIEIQEKSHSRSELLQQALCNAKIFGEDEVELMNWLNEVHDKLSKLSVQDYSTEGLWKQQSELRVLQEDILLRKQNVDQALLNGLELLKQTTGDEVLIIQDKLEAIKARYKDITKLSTDVAKTLEQALQLARRLHSTHEELCTWLDKVEVELLSYETQVLKGEEASQAQMRPKELKKEAKNNKALLDSLNEVSSALLELVPWRAREGLEKMVAEDNERYRLVSDTITQKVEEIDAAILRSQQFDQAADAELSWITETEKKLMSLGDIRLEQDQTSAQLQVQKTFTMEILRHKDIIDDLVKSGHKIMTACSEEEKQSMKKKLDKVLKNYDTICQINSERYLQLERAQSLVNQFWETYEELWPWLTETQSIISQLPAPALEYETLRQQQEEHRQLRELIAEHKPHIDKMNKTGPQLLELSPGEGFSIQEKYVAADTLYSQIKEDVKKRAVALDEAISQSTQFHDKIDQILESLERIVERLRQPPSISAEVEKIKEQISENKNVSVDMEKLQPLYETLKQRGEEMIARSGGTDKDISAKAVQDKLDQMVFIWENIHTLVEEREAKLLDVMELAEKFWCDHMSLIVTIKDTQDFIRDLEDPGIDPSVVKQQQEAAETIREEIDGLQEELDIVINLGSELIAACGEPDKPIVKKSIDELNSAWDSLNKAWKDRIDKLEEAMQAAVQYQDGLQAVFDWVDIAGGKLASMSPIGTDLETVKQQIEELKQFKSEAYQQQIEMERLNHQAELLLKKVTEESDKHTVQDPLMELKLIWDSLEERIINRQHKLEGALLALGQFQHALDELLAWLTHTEGLLSEQKPVGGDPKAIEIELAKHHVLQNDVLAHQSTVEAVNKAGNDLIESSAGEEASNLQNKLEVLNQRWQNVLEKTEQRKQQLDGALRQAKGFHGEIEDLQQWLTDTERHLLASKPLGGLPETAKEQLNVHMEVCAAFEAKEETYKSLMQKGQQMLARCPKSAETNIDQDINNLKEKWESVETKLNERKTKLEEALNLAMEFHNSLQDFINWLTQAEQTLNVASRPSLILDTVLFQIDEHKVFANEVNSHREQIIELDKTGTHLKYFSQKQDVVLIKNLLISVQSRWEKVVQRLVERGRSLDDARKRAKQFHEAWSKLMEWLEESEKSLDSELEIANDPDKIKTQLAQHKEFQKSLGAKHSVYDTTNRTGRSLKEKTSLADDNLKLDDMLSELRDKWDTICGKSVERQNKLEEALLFSGQFTDALQALIDWLYRVEPQLAEDQPVHGDIDLVMNLIDNHKAFQKELGKRTSSVQALKRSARELIEGSRDDSSWVKVQMQELSTRWETVCALSISKQTRLEAALRQAEEFHSVVHALLEWLAEAEQTLRFHGVLPDDEDALRTLIDQHKEFMKKLEEKRAELNKATTMGDTVLAICHPDSITTIKHWITIIRARFEEVLAWAKQHQQRLASALAGLIAKQELLEALLAWLQWAETTLTDKDKEVIPQEIEEVKALIAEHQTFMEEMTRKQPDVDKVTKTYKRRAADPSSLQSHIPVLDKGRAGRKRFPASSLYPSGSQTQIETKNPRVNLLLREFANFDFDIWRKKYMRWMNHKKSRVMDFFRRIDKDQDGKITRQEFIDGILSSKFPTSRLEMSAVADIFDRDGDGYIDYYEFVAALHPNKDAYKPITDADKIEDEVTRQVAKCKCAKRFQVEQIGDNKYRVSFQSNFGDSQQLRLVRILRSTVMVRVGGGWMALDEFLVKNDPCRVHHHGSKMLRSESNSSITTTQPTIAKGRTNMELREKFILADGASQGMAAFRPRGRRSRPSSRGASPNRSTSVSSQAAQAASPQVPATTTPKGTPIQGSKLRLPGYLSGKGFHSGEDSGLITTAAARVRTQFADSKKTPSRPGSRAGSKAGSRASSRRGSDASDFDISEIQSVCSDVETVPQTHRPTPRAGSRPSTAKPSKIPTPQRKSPASKLDKSSKR

SEQ ID NO: 20099 - protein, 5239 aa, Artificial Sequence
  Synthetic polypeptide
PLISDIHVTGESEDMSAKERLLLWTQQATEGYAGIRCENFTTCWRDGKLFNAIIHKYRPDLIDMNTVAVQSNLANLEHAFYVAEKIGVIRLLDPEDVDVSSPDEKSVITYVSSLYDAFPKVPEGGEGIGANDVEVKWIEYQNMVNYLIQWIRHHVTTMSERTFPNNPVELKALYNQYLQFKETEIPPKETEKSKIKRLYKLLEIWIEFGRIKLLQGYHPNDIEKEWGKLIIAMLEREKALRPEVERLEMLQQIANRVQRDSVICEDKLILAGNALQSDSKRLESGVQFQNEAEIAGYILECENLLRQHVIDVQILIDGKYYQADQLVQRVAKLRDEIMALRNECSSVYSKGRILTTEQTKLMISGITQSLNSGFAQTLHPSLTSGLTQSLTPSLTSSSMTSGLSSGMTSRLTPSVTPAYTPGFPSGLVPNFSSGVEPNSLQTLKLMQIRKPLLKSSLLDQNLTEEEINMKFVQDLLNWVDEMQVQLDRTEWGSDLPSVESHLENHKNVHRAIEEFESSLKEAKISEIQMTAPLKLTYAEKLHRLESQYAKLLNTSRNQERHLDTLHNFVSRATNELIWLNEKEEEEVAYDWSERNTNIARKKDYHAELMRELDQKEENIKSVQEIAEQLLLENHPARLTIEAYRAAMQTQWSWILQLCQCVEQHIKENTAYFEFFNDAKEATDYLRNLKDAIQRKYSCDRSSSIHKLEDLVQESMEEKEELLQYKSTIANLMGKAKTIIQLKPRNSDCPLKTSIPIKAICDYRQIEITIYKDDECVLANNSHRAKWKVISPTGNEAMVPSVCFTVPPPNKEAVDLANRIEQQYQNVLTLWHESHINMKSVVSWHYLINEIDRIRASNVASIKTMLPGEHQQVLSNLQSRFEDFLEDSQESQVFSGSDITQLEKEVNVCKQYYQELLKSAEREEQEESVYNLYISEVRNIRLRLENCEDRLIRQIRTPLERDDLHESVFRITEQEKLKKELERLKDDLGTITNKCEEFFSQAAASSSVPTLRSELNVVLQNMNQVYSMSSTYIDKLKTVNLVLKNTQAAEALVKLYETKLCEEEAVIADKNNIENLISTLKQWRSEVDEKRQVFHALEDELQKAKAISDEMFKTYKERDLDFDWHKEKADQLVERWQNVHVQIDNRLRDLEGIGKSLKYYRDTYHPLDDWIQQVETTQRKIQENQPENSKTLATQLNQQKMLVSEIEMKQSKMDECQKYAEQYSATVKDYELQTMTYRAMVDSQQKSPVKRRRMQSSADLIIQEFMDLRTRYTALVTLMTQYIKFAGDSLKRLEEEEKSLEEEKKEHVEKAKELQKWVSNISKTLKDAEKAGKPPFSKQKISSEEISTKKEQLSEALQTIQLFLAKHGDKMTDEERNELEKQVKTLQESYNLLFSESLKQLQESQTSGDVKVEEKIVAERQQEYKEKLQGICDLLTQTENRLIGHQEAFMIGDGTVELKKYQSKQEELQKDMQGSAQALAEVVKNTENFLKENGEKLSQEDKALIEQKLNEAKIKCEQLNLKAEQSKKELDKVVTTAIKEETEKVAAVKQLEESKTKIENLLDWLSNVDKDSERAGTKHKQVIEQNGTHFQEGDGKSAIGEEDEVNGNLLETDVDGQVGTTQENLNQQYQKVKAQHEKIISQHQAVIIATQSAQVLLEKQGQYLSPEEKEKLQKNMKELKVHYETALAESEKKMKLTHSLQEELEKFDADYTEFEHWLQQSEQELENLEAGADDINGLMTKLKRQKSFSEDVISHKGDLRYITISGNRVLEAAKSCSKRDGGKVDTSATHREVQRKLDHATDRFRSLYSKCNVLGNNLKDLVDKYQHYEDASCGLLAGLQACEATASKHLSEPIAVDPKNLQRQLEETKALQGQISSQQVAVEKLKKTAEVLLDARGSLLPAKNDIQKTLDDIVGRYEDLSKSVNERNEKLQITLTRSLSVQDGLDEMLDWMGNVESSLKEQGQVPLNSTALQDIISKNIMLEQDIAGRQSSINAMNEKVKKFMETTDPSTASSLQAKMKDLSARFSEASHKHKETLAKMEELKTKVELFENLSEKLQTFLETKTQALTEVDVPGKDVTELSQYMQESTSEFLEHKKHLEVLHSLLKEISSHGLPSDKALVLEKTNNLSKKFKEMEDTIKEKKEAVTSCQEQLDAFQVLVKSLKSWIKETTKKVPIVQPSFGAEDLGKSLEDTKKLQEKWSLKTPEIQKVNNSGISLCNLISAVTTPAKAIAAVKSGGAVLNGEGTATNTEEFWANKGLTSIKKDMTDISHGYEDLGLLLKDKIAELNTKLSKLQKAQEESSAMMQWLQKMNKTATKWQQTPAPTDTEAVKTQVEQNKSFEAELKQNVNKVQELKDKLTELLEENPDTPEAPRWKQMLTEIDSKWQELNQLTIDRQQKLEESSNNLTQFQTVEAQLKQWLVEKELMVSVLGPLSIDPNMLNTQRQQVQILLQEFATRKPQYEQLTAAGQGILSRPGEDPSLRGIVKEQLAAVTQKWDSLTGQLSDRCDWIDQAIVKSTQYQSLLRSLSDKLSDLDNKLSSSLAVSTHPDAMNQQLETAQKMKQEIQQEKKQIKVAQALCEDLSALVKEEYLKAELSRQLEGILKSFKDVEQKAENHVQHLQSACASSHQFQQMSRDFQAWLDTKKEEQNKSHPISAKLDVLESLIKDHKDFSKTLTAQSHMYEKTIAEGENLLLKTQGSEKAALQLQLNTIKTNWDTFNKQVKERENKLKESLEKALKYKEQVETLWPWIDKCQNNLEEIKFCLDPAEGENSIAKLKSLQKEMDQHFGMVELLNNTANSLLSVCEIDKEVVTDENKSLIQKVDMVTEQLHSKKFCLENMTQKFKEFQEVSKESKRQLQCAKEQLDIHDSLGSQAYSNKYLTMLQTQQKSLQALKHQVDLAKRLAQDLVVEASDSKGTSDVLLQVETIAQEHSTLSQQVDEKCSFLETKLQGIGHFQNTIREMFSQFAEFDDELDSMAPVGRDAETLQKQKETIKAFLKKLEALMASNDNANKTCKMMLATEETSPDLVGIKRDLEALSKQCNKLLDRAQAREEQVEGTIKRLEEFYSKLKEFSILLQKAEEHEESQGPVGMETETINQQLNMFKVFQKEEIEPLQGKQQDVNWLGQGLIQSAAKSTSTQGLEHDLDDVNARWKTLNKKVAQRAAQLQEALLHCGRFQDALESLLSWMVDTEELVANQKPPSAEFKVVKAQIQEQKLLQRLLDDRKSTVEVIKREGEKIATTAEPADKVKILKQLSLLDSRWEALLNKAETRNRQLEGISVVAQQFHETLEPLNEWLTTIEKRLVNCEPIGTQASKLEEQIAQHKVLQEDILLRKQNVDQALLNGLELLKQTTGDEVLIIQDKLEAIKARYKDITKLSTDVAKTLEQALQLARRLHSTHEELCTWLDKVEVELLSYETQVLKGEEASQAQMRPKELKKEAKNNKALLDSLNEVSSALLELVPWRAREGLEKMVAEDNERYRLVSDTITQKVEEIDAAILRSQQFDQAADAELSWITETEKKLMSLGDIRLEQDQTSAQLQVQKTFTMEILRHKDIIDDLVKSGHKIMTACSEEEKQSMKKKLDKVLKNYDTICQINSERYLQLERAQSLVNQFWETYEELWPWLTETQSIISQLPAPALEYETLRQQQEEHRQLRELIAEHKPHIDKMNKTGPQLLELSPGEGFSIQEKYVAADTLYSQIKEDVKKRAVALDEAISQSTQFHDKIDQILESLERIVERLRQPPSISAEVEKIKEQISENKNVSVDMEKLQPLYETLKQRGEEMIARSGGTDKDISAKAVQDKLDQMVFIWENIHTLVEEREAKLLDVMELAEKFWCDHMSLIVTIKDTQDFIRDLEDPGIDPSVVKQQQEAAETIREEIDGLQEELDIVINLGSELIAACGEPDKPIVKKSIDELNSAWDSLNKAWKDRIDKLEEAMQAAVQYQDGLQAVFDWVDIAGGKLASMSPIGTDLETVKQQIEELKQFKSEAYQQQIEMERLNHQAELLLKKVTEESDKHTVQDPLMELKLIWDSLEERIINRQHKLEGALLALGQFQHALDELLAWLTHTEGLLSEQKPVGGDPKAIEIELAKHHVLQNDVLAHQSTVEAVNKAGNDLIESSAGEEASNLQNKLEVLNQRWQNVLEKTEQRKQQLDGALRQAKGFHGEIEDLQQWLTDTERHLLASKPLGGLPETAKEQLNVHMEVCAAFEAKEETYKSLMQKGQQMLARCPKSAETNIDQDINNLKEKWESVETKLNERKTKLEEALNLAMEFHNSLQDFINWLTQAEQTLNVASRPSLILDTVLFQIDEHKVFANEVNSHREQIIELDKTGTHLKYFSQKQDVVLIKNLLISVQSRWEKVVQRLVERGRSLDDARKRAKQFHEAWSKLMEWLEESEKSLDSELEIANDPDKIKTQLAQHKEFQKSLGAKHSVYDTTNRTGRSLKEKTSLADDNLKLDDMLSELRDKWDTICGKSVERQNKLEEALLFSGQFTDALQALIDWLYRVEPQLAEDQPVHGDIDLVMNLIDNHKAFQKELGKRTSSVQALKRSARELIEGSRDDSSWVKVQMQELSTRWETVCALSISKQTRLEAALRQAEEFHSVVHALLEWLAEAEQTLRFHGVLPDDEDALRTLIDQHKEFMKKLEEKRAELNKATTMGDTVLAICHPDSITTIKHWITIIRARFEEVLAWAKQHQQRLASALAGLIAKQELLEALLAWLQWAETTLTDKDKEVIPQEIEEVKALIAEHQTFMEEMTRKQPDVDKVTKTYKRRAADPSSLQSHIPVLDKGRAGRKRFPASSLYPSGSQTQIETKNPRVNLLVSKWQQVWLLALERRRKLNDALDRLEELREFANFDFDIWRKKYMRWMNHKKSRVMDFFRRIDKDQDGKITRQEFIDGILSSKFPTSRLEMSAVADIFDRDGDGYIDYYEFVAALHPNKDAYKPITDADKIEDEVTRQVAKCKCAKRFQVEQIGDNKYRFFLGNQFGDSQQLRLVRILRSTVMVRVGGGWMALDEFLVKNDPCRVHHHGSKMLRSESNSSITTTQPTIAKGRTNMELREKFILADGASQGMAAFRPRGRRSRPSSRGASPNRSTSVSSQAAQAASPQVPATTTPKGTPIQGSKLRLPGYLSGKGFHSGEDSGLITTAAARVRTQFADSKKTPSRPGSRAGSKAGSRASSRRGSDASDFDISEIQSVCSDVETVPQTHRPTPRAGSRPSTAKPSKIPTPQRKSPASKLDKSSKR

SEQ ID NO: 20100 - protein, 7436 aa, Artificial Sequence
  Synthetic polypeptide
PLISDIHVTGESEDMSAKERLLLWTQQATEGYAGIRCENFTTCWRDGKLFNAIIHKYRPDLIDMNTVAVQSNLANLEHAFYVAEKIGVIRLLDPEDVDVSSPDEKSVITYVSSLYDAFPKVPEGGEGIGANDVEVKWIEYQNMVNYLIQWIRHHVTTMSERTFPNNPVELKALYNQYLQFKETEIPPKETEKSKIKRLYKLLEIWIEFGRIKLLQGYHPNDIEKEWGKLIIAMLEREKALRPEVERLEMLQQIANRVQRDSVICEDKLILAGNALQSDSKRLESGVQFQNEAEIAGYILECENLLRQHVIDVQILIDGKYYQADQLVQRVAKLRDEIMALRNECSSVYSKGRILTTEQTKLMISGITQSLNSGFAQTLHPSLTSGLTQSLTPSLTSSSMTSGLSSGMTSRLTPSVTPAYTPGFPSGLVPNFSSGVEPNSLQTLKLMQIRKPLLKSSLLDQNLTEEEINMKFVQDLLNWVDEMQVQLDRTEWGSDLPSVESHLENHKNVHRAIEEFESSLKEAKISEIQMTAPLKLTYAEKLHRLESQYAKLLNTSRNQERHLDTLHNFVSRATNELIWLNEKEEEEVAYDWSERNTNIARKKDYHAELMRELDQKEENIKSVQEIAEQLLLENHPARLTIEAYRAAMQTQWSWILQLCQCVEQHIKENTAYFEFFNDAKEATDYLRNLKDAIQRKYSCDRSSSIHKLEDLVQESMEEKEELLQYKSTIANLMGKAKTIIQLKPRNSDCPLKTSIPIKAICDYRQIEITIYKDDECVLANNSHRAKWKVISPTGNEAMVPSVCFTVPPPNKEAVDLANRIEQQYQNVLTLWHESHINMKSVVSWHYLINEIDRIRASNVASIKTMLPGEHQQVLSNLQSRFEDFLEDSQESQVFSGSDITQLEKEVNVCKQYYQELLKSAEREEQEESVYNLYISEVRNIRLRLENCEDRLIRQIRTPLERDDLHESVFRITEQEKLKKELERLKDDLGTITNKCEEFFSQAAASSSVPTLRSELNVVLQNMNQVYSMSSTYIDKLKTVNLVLKNTQAAEALVKLYETKLCEEEAVIADKNNIENLISTLKQWRSEVDEKRQVFHALEDELQKAKAISDEMFKTYKERDLDFDWHKEKADQLVERWQNVHVQIDNRLRDLEGIGKSLKYYRDTYHPLDDWIQQVETTQRKIQENQPENSKTLATQLNQQKMLVSEIEMKQSKMDECQKYAEQYSATVKDYELQTMTYRAMVDSQQKSPVKRRRMQSSADLIIQEFMDLRTRYTALVTLMTQYIKFAGDSLKRLEEEEKSLEEEKKEHVEKAKELQKWVSNISKTLKDAEKAGKPPFSKQKISSEEISTKKEQLSEALQTIQLFLAKHGDKMTDEERNELEKQVKTLQESYNLLFSESLKQLQESQTSGDVKVEEKLDKVIAGTIDQTTGEVLSVFQAVLRGLIDYDTGIRLLETQLMISGLISPELRKCFDLKDAKSHGLIDEQILCQLKELSKAKEIISAASPTTIPVLDALAQSMITESMAIKVLEILLSTGSLVIPATGEQLTLQKAFQQNLVSSALFSKVLERQNMCKDLIDPCTSEKVSLIDMVQRSTLQENTGMWLLPVRPQEGGRITLKCGRNISILRAAHEGLIDRETMFRLLSAQLLSGGLINSNSGQRMTVEEAVREGVIDRDTASSILTYQVQTGGIIQSNPAKRLTVDEAVQCDLITSSSALLVLEAQRGYVGLIWPHSGEIFPTSSSLQQELITNELAYKILNGRQKIAALYIPESSQVIGLDAAKQLGIIDNNTASILKNITLPDKMPDLGDLEACKNARRWLSFCKFQPSTVHDYRQEEDVFDGEEPVTTQTSEETKKLFLSYLMINSYMDANTGQRLLLYDGDLDEAVGMLLEGCHAEFDGNTAIKECLDVLSSSGVFLNNASGREKDECTATPSSFNKCHCGEPEHEETPENRKCAIDEEFNEMRNTVINSEFSQSGKLASTISIDPKVNSSPSVCVPSLISYLTQTELADISMLRSDSENILTNYENQSRVETNERANECSHSKNIQNFPSDLIENPIMKSKMSKFCGVNETENEDNTNRDSPIFDYSPRLSALLSHDKLMHSQGSFNDTHTPESNGNKCEAPALSFSDKTMLSGQRIGEKFQDQFLGIAAINISLPGEQYGQKSLNMISSNPQVQYHNDKYISNTSGEDEKTHPGFQQMPEDKEDESEIEEYSCAVTPGGDTDNAIVSLTCATPLLDETISASDYETSLLNDQQNNTGTDTDSDDDFYDTPLFEDDDHDSLLLDGDDRDCLHPEDYDTLQEENDETASPADVFYDVSKENENSMVPQGAPVGSLSVKNKAHCLQDFLMDVEKDELDSGEKIHLNPVGSDKVNGQSLETGSERECTNILEGDESDSLTDYDIVGGKESFTASLKFDDSGSWRGRKEEYVTGQEFHSDTDHLDSMQSEESYGDYIYDSNDQDDDDDDGIDEEGGGIRDENGKPRCQNVAEDMDIQLCASILNENSDENENINTMILLDKMHSCSSLEKQQRVNVVQLASPSENNLVTEKSNLPEYTTEIAGKSKENLLNHEMVLKDVLPPIIKDTESEKTFGPASISHDNNNISSTSELGTDLANTKVKLIQGSELPELTDSVKGKDEYFKNMTPKVDSSLDHIICTEPDLIGKPAEESHLSLIASVTDKDPQGNGSDLIKGRDGKSDILIEDETSIQKMYLGEGEVLVEGLVEEENRHLKLLPGKNTRDSFKLINSQFPFPQITNNEELNQKGSLKKATVTLKDEPNNLQIIVSKSPVQFENLEEIFDTSVSKEISDDITSDITSWEGNTHFEESFTDGPEKELDLFTYLKHCAKNIKAKDVAKPNEDVPSHVLITAPPMKEHLQLGVNNTKEKSTSTQKDSPLNDMIQSNDLCSKESISGGGTEISQFTPESIEATLSILSRKHVEDVGKNDFLQSERCANGLGNDNSSNTLNTDYSFLEINNKKERIEQQLPKEQALSPRSQEKEVQIPELSQVFVEDVKDILKSRLKEGHMNPQEVEEPSACADTKILIQNLIKRITTSQLVNEASTVPSDSQMSDSSGVSPMTNSSELKPESRDDPFCIGNLKSELLLNILKQDQHSQKITGVFELMRELTHMEYDLEKRGITSKVLPLQLENIFYKLLADGYSEKIEHVGDFNQKACSTSEMMEEKPHILGDIKSKEGNYYSPNLETVKEIGLESSTVWASTLPRDEKLKDLCNDFPSHLECTSGSKEMASGDSSTEQFSSELQQCLQHTEKMHEYLTLLQDMKPPLDNQESLDNNLEALKNQLRQLETFELGLAPIAVILRKDMKLAEEFLKSLPSDFPRGHVEELSISHQSLKTAFSSLSNVSSERTKQIMLAIDSEMSKLAVSHEEFLHKLKSFSDWVSEKSKSVKDIEIVNVQDSEYVKKRLEFLKANNVLKDLGHTKMQLETTAFDVQFFISEYAQDLSPNQSKQLLRLLNTTQKCFLDVQESVTTQVERLETQLHLEQDLDDQKIVAERQQEYKEKLQGICDLLTQTENRLIGHQEAFMIGDGTVELKKYQSKQEELQKDMQGSAQALAEVVKNTENFLKENGEKLSQEDKALIEQKLNEAKIKCEQLNLKAEQSKKELDKVVTTAIKEETEKVAAVKQLEESKTKIENLLDWLSNVDKDSERAGTKHKQVIEQNGTHFQEGDGKSAIGEEDEVNGNLLETDVDGQVGTTQENLNQQYQKVKAQHEKIISQHQAVIIATQSAQVLLEKQGQYLSPEEKEKLQKNMKELKVHYETALAESEKKMKLTHSLQEELEKFDADYTEFEHWLQQSEQELENLEAGADDINGLMTKLKRQKSFSEDVISHKGDLRYITISGNRVLEAAKSCSKRDGGKVDTSATHREVQRKLDHATDRFRSLYSKCNVLGNNLKDLVDKYQHYEDASCGLLAGLQACEATASKHLSEPIAVDPKNLQRQLEETKALQGQISSQQVAVEKLKKTAEVLLDARGSLLPAKNDIQKTLDDIVGRYEDLSKSVNERNEKLQITLTRSLSVQDGLDEMLDWMGNVESSLKEQGQVPLNSTALQDIISKNIMLEQDIAGRQSSINAMNEKVKKFMETTDPSTASSLQAKMKDLSARFSEASHKHKETLAKMEELKTKVELFENLSEKLQTFLETKTQALTEVDVPGKDVTELSQYMQESTSEFLEHKKHLEVLHSLLKEISSHGLPSDKALVLEKTNNLSKKFKEMEDTIKEKKEAVTSCQEQLDAFQVLVKSLKSWIKETTKKVPIVQPSFGAEDLGKSLEDTKKLQEKWSLKTPEIQKVNNSGISLCNLISAVTTPAKAIAAVKSGGAVLNGEGTATNTEEFWANKGLTSIKKDMTDISHGYEDLGLLLKDKIAELNTKLSKLQKAQEESSAMMQWLQKMNKTATKWQQTPAPTDTEAVKTQVEQNKSFEAELKQNVNKVQELKDKLTELLEENPDTPEAPRWKQMLTEIDSKWQELNQLTIDRQQKLEESSNNLTQFQTVEAQLKQWLVEKELMVSVLGPLSIDPNMLNTQRQQVQILLQEFATRKPQYEQLTAAGQGILSRPGEDPSLRGIVKEQLAAVTQKWDSLTGQLSDRCDWIDQAIVKSTQYQSLLRSLSDKLSDLDNKLSSSLAVSTHPDAMNQQLETAQKMKQEIQQEKKQIKVAQALCEDLSALVKEEYLKAELSRQLEGILKSFKDVEQKAENHVQHLQSACASSHQFQQMSRDFQAWLDTKKEEQNKSHPISAKLDVLESLIKDHKDFSKTLTAQSHMYEKTIAEGENLLLKTQGSEKAALQLQLNTIKTNWDTFNKQVKERENKLKESLEKALKYKEQVETLWPWIDKCQNNLEEIKFCLDPAEGENSIAKLKSLQKEMDQHFGMVELLNNTANSLLSVCEIDKEVVTDENKSLIQKVDMVTEQLHSKKFCLENMTQKFKEFQEVSKESKRQLQCAKEQLDIHDSLGSQAYSNKYLTMLQTQQKSLQALKHQVDLAKRLAQDLVVEASDSKGTSDVLLQVETIAQEHSTLSQQVDEKCSFLETKLQGIGHFQNTIREMFSQFAEFDDELDSMAPVGRDAETLQKQKETIKAFLKKLEALMASNDNANKTCKMMLATEETSPDLVGIKRDLEALSKQCNKLLDRAQAREEQVEGTIKRLEEFYSKLKEFSILLQKAEEHEESQGPVGMETETINQQLNMFKVFQKEEIEPLQGKQQDVNWLGQGLIQSAAKSTSTQGLEHDLDDVNARWKTLNKKVAQRAAQLQEALLHCGRFQDALESLLSWMVDTEELVANQKPPSAEFKVVKAQIQEQKLLQRLLDDRKSTVEVIKREGEKIATTAEPADKVKILKQLSLLDSRWEALLNKAETRNRQLEGISVVAQQFHETLEPLNEWLTTIEKRLVNCEPIGTQASKLEEQIAQHKALEDDIINHNKHLHQAVSIGQSLKVLSSREDKDMVQSKLDFSQVWYIEIQEKSHSRSELLQQALCNAKIFGEDEVELMNWLNEVHDKLSKLSVQDYSTEGLWKQQSELRVLQEDILLRKQNVDQALLNGLELLKQTTGDEVLIIQDKLEAIKARYKDITKLSTDVAKTLEQALQLARRLHSTHEELCTWLDKVEVELLSYETQVLKGEEASQAQMRPKELKKEAKNNKALLDSLNEVSSALLELVPWRAREGLEKMVAEDNERYRLVSDTITQKVEEIDAAILRSQQFDQAADAELSWITETEKKLMSLGDIRLEQDQTSAQLQVQKTFTMEILRHKDIIDDLVKSGHKIMTACSEEEKQSMKKKLDKVLKNYDTICQINSERYLQLERAQSLVNQFWETYEELWPWLTETQSIISQLPAPALEYETLRQQQEEHRQLRELIAEHKPHIDKMNKTGPQLLELSPGEGFSIQEKYVAADTLYSQIKEDVKKRAVALDEAISQSTQFHDKIDQILESLERIVERLRQPPSISAEVEKIKEQISENKNVSVDMEKLQPLYETLKQRGEEMIARSGGTDKDISAKAVQDKLDQMVFIWENIHTLVEEREAKLLDVMELAEKFWCDHMSLIVTIKDTQDFIRDLEDPGIDPSVVKQQQEAAETIREEIDGLQEELDIVINLGSELIAACGEPDKPIVKKSIDELNSAWDSLNKAWKDRIDKLEEAMQAAVQYQDGLQAVFDWVDIAGGKLASMSPIGTDLETVKQQIEELKQFKSEAYQQQIEMERLNHQAELLLKKVTEESDKHTVQDPLMELKLIWDSLEERIINRQHKLEGALLALGQFQHALDELLAWLTHTEGLLSEQKPVGGDPKAIEIELAKHHVLQNDVLAHQSTVEAVNKAGNDLIESSAGEEASNLQNKLEVLNQRWQNVLEKTEQRKQQLDGALRQAKGFHGEIEDLQQWLTDTERHLLASKPLGGLPETAKEQLNVHMEVCAAFEAKEETYKSLMQKGQQMLARCPKSAETNIDQDINNLKEKWESVETKLNERKTKLEEALNLAMEFHNSLQDFINWLTQAEQTLNVASRPSLILDTVLFQIDEHKVFANEVNSHREQIIELDKTGTHLKYFSQKQDVVLIKNLLISVQSRWEKVVQRLVERGRSLDDARKRAKQFHEAWSKLMEWLEESEKSLDSELEIANDPDKIKTQLAQHKEFQKSLGAKHSVYDTTNRTGRSLKEKTSLADDNLKLDDMLSELRDKWDTICGKSVERQNKLEEALLFSGQFTDALQALIDWLYRVEPQLAEDQPVHGDIDLVMNLIDNHKAFQKELGKRTSSVQALKRSARELIEGSRDDSSWVKVQMQELSTRWETVCALSISKQTRLEAALRQAEEFHSVVHALLEWLAEAEQTLRFHGVLPDDEDALRTLIDQHKEFMKKLEEKRAELNKATTMGDTVLAICHPDSITTIKHWITIIRARFEEVLAWAKQHQQRLASALAGLIAKQELLEALLAWLQWAETTLTDKDKEVIPQEIEEVKALIAEHQTFMEEMTRKQPDVDKVTKTYKRRAADPSSLQSHIPVLDKGRAGRKRFPASSLYPSGSQTQIETKNPRVNLLVSKWQQVWLLALERRRKLNDALDRLEELREFANFDFDIWRKKYMRWMNHKKSRVMDFFRRIDKDQDGKITRQEFIDGILSSKFPTSRLEMSAVADIFDRDGDGYIDYYEFVAALHPNKDAYKPITDADKIEDEVTRQVAKCKCAKRFQVEQIGDNKYRVSFQSNFGDSQQLRLVRILRSTVMVRVGGGWMALDEFLVKNDPCRVHHHGSKMLRSESNSSITTTQPTIAKGRTNMELREKFILADGASQGMAAFRPRGRRSRPSSRGASPNRSTSVSSQAAQAASPQVPATTTPKGTPIQGSKLRLPGYLSGKGFHSGEDSGLITTAAARVRTQFADSKKTPSRPGSRAGSKAGSRASSRRGSDASDFDISEIQSVCSDVETVPQTHRPTPRAGSRPSTAKPSKIPTPQRKSPASKLDKSSKR

SEQ ID NO: 20101 - protein, 4064 aa, Artificial Sequence
  Synthetic polypeptide
PLISDIHVTGESEDMSAKERLLLWTQQATEGYAGIRCENFTTCWRDGKLFNAIIHKYRPDLIDMNTVAVQSNLANLEHAFYVAEKIGVIRLLDPEDVDVSSPDEKSVITYVSSLYDAFPKVPEGGEGIGANDVEVKWIEYQNMVNYLIQWIRHHVTTMSERTFPNNPVELKALYNQYLQFKETEIPPKETEKSKIKRLYKLLEIWIEFGRIKLLQGYHPNDIEKEWGKLIIAMLEREKALRPEVERLEMLQQIANRVQRDSVICEDKLILAGNALQSDSKRLESGVQFQNEAEIAGYILECENLLRQHVIDVQILIDGKYYQADQLVQRVAKLRDEIMALRNECSSVYSKGRILTTEQTKLMISGITQSLNSGFAQTLHPSLTSGLTQSLTPSLTSSSMTSGLSSGMTSRLTPSVTPAYTPGFPSGLVPNFSSGVEPNSLQTLKLMQIRKPLLKSSLLDQNLTEEEINMKFVQDLLNWVDEMQVQLDRTEWGSDLPSVESHLENHKNVHRAIEEFESSLKEAKISEIQMTAPLKLTYAEKLHRLESQYAKLLNTSRNQERHLDTLHNFVSRATNELIWLNEKEEEEVAYDWSERNTNIARKKDYHAELMRELDQKEENIKSVQEIAEQLLLENHPARLTIEAYRAAMQTQWSWILQLCQCVEQHIKENTAYFEFFNDAKEATDYLRNLKDAIQRKYSCDRSSSIHKLEDLVQESMEEKEELLQYKSTIANLMGKAKTIIQLKPRNSDCPLKTSIPIKAICDYRQIEITIYKDDECVLANNSHRAKWKVISPTGNEAMVPSVCFTVPPPNKEAVDLANRIEQQYQNVLTLWHESHINMKSVVSWHYLINEIDRIRASNVASIKTMLPGEHQQVLSNLQSRFEDFLEDSQESQVFSGSDITQLEKEVNVCKQYYQELLKSAEREEQEESVYNLYISEVRNIRLRLENCEDRLIRQIRTPLERDDLHESVFRITEQEKLKKELERLKDDLGTITNKCEEFFSQAAASSSVPTLRSELNVVLQNMNQVYSMSSTYIDKLKTVNLVLKNTQAAEALVKLYETKLCEEEAVIADKNNIENLISTLKQWRSEVDEKRQVFHALEDELQKAKAISDEMFKTYKERDLDFDWHKEKADQLVERWQNVHVQIDNRLRDLEGIGKSLKYYRDTYHPLDDWIQQVETTQRKIQENQPENSKTLATQLNQQKMLVSEIEMKQSKMDECQKYAEQYSATVKDYELQTMTYRAMVDSQQKSPVKRRRMQSSADLIIQEFMDLRTRYTALVTLMTQYIKFAGDSLKRLEEEEKSLEEEKKEHVEKAKELQKWVSNISKTLKDAEKAGKPPFSKQKISSEEISTKKEQLSEALQTIQLFLAKHGDKMTDEERNELEKQVKTLQESYNLLFSESLKQLQESQTSGDVKVEEKLDKVIAGTIDQTTGEVLSVFQAVLRGLIDYDTGIRLLETQLMISGLISPELRKCFDLKDAKSHGLIDEQILCQLKELSKAKEIISAASPTTIPVLDALAQSMITESMAIKVLEILLSTGSLVIPATGEQLTLQKAFQQNLVSSALFSKVLERQNMCKDLIDPCTSEKVSLIDMVQRSTLQENTGMWLLPVRPQEGGRITLKCGRNISILRAAHEGLIDRETMFRLLSAQLLSGGLINSNSGQRMTVEEAVREGVIDRDTASSILTYQVQTGGIIQSNPAKRLTVDEAVQCDLITSSSALLVLEAQRGYVGLIWPHSGEIFPTSSSLQQELITNELAYKILNGRQKIAALYIPESSQVIGLDAAKQLGIIDNNTASILKNITLPDKMPDLGDLEACKNARRWLSFCKFQPSTVHDYRQEEDVFDGEEPVTTQTSEETKKLFLSYLMINSYMDANTGQRLLLYDGDLDEAVGMLLEGCHAEFDGNTAIKECLDVLSSSGVFLNNASGREKDECTATPSSFNKCHCGEPEHEETPENRKCAIDEEFNEMRNTVINSEFSQSGKLASTISIDPKVNSSPSVCVPSLISYLTQTELADISMLRSDSENILTNYENQSRVETNERANECSHSKNIQNFPSDLIENPIMKSKMSKFCGVNETENEDNTNRDSPIFDYSPRLSALLSHDKLMHSQGSFNDTHTPESNGNKCEAPALSFSDKTMLSGQRIGEKFQDQFLGIAAINISLPGEQYGQKSLNMISSNPQVQYHNDKYISNTSGEDEKTHPGFQQMPEDKEDESEIEEYSCAVTPGGDTDNAIVSLTCATPLLDETISASDYETSLLNDQQNNTGTDTDSDDDFYDTPLFEDDDHDSLLLDGDDRDCLHPEDYDTLQEENDETASPADVFYDVSKENENSMVPQGAPVGSLSVKNKAHCLQDFLMDVEKDELDSGEKIHLNPVGSDKVNGQSLETGSERECTNILEGDESDSLTDYDIVGGKESFTASLKFDDSGSWRGRKEEYVTGQEFHSDTDHLDSMQSEESYGDYIYDSNDQDDDDDDGIDEEGGGIRDENGKPRCQNVAEDMDIQLCASILNENSDENENINTMILLDKMHSCSSLEKQQRVNVVQLASPSENNLVTEKSNLPEYTTEIAGKSKENLLNHEMVLKDVLPPIIKDTESEKTFGPASISHDNNNISSTSELGTDLANTKVKLIQGSELPELTDSVKGKDEYFKNMTPKVDSSLDHIICTEPDLIGKPAEESHLSLIASVTDKDPQGNGSDLIKGRDGKSDILIEDETSIQKMYLGEGEVLVEGLVEEENRHLKLLPGKNTRDSFKLINSQFPFPQITNNEELNQKGSLKKATVTLKDEPNNLQIIVSKSPVQFENLEEIFDTSVSKEISDDITSDITSWEGNTHFEESFTDGPEKELDLFTYLKHCAKNIKAKDVAKPNEDVPSHVLITAPPMKEHLQLGVNNTKEKSTSTQKDSPLNDMIQSNDLCSKESISGGGTEISQFTPESIEATLSILSRKHVEDVGKNDFLQSERCANGLGNDNSSNTLNTDYSFLEINNKKERIEQQLPKEQALSPRSQEKEVQIPELSQVFVEDVKDILKSRLKEGHMNPQEVEEPSACADTKILIQNLIKRITTSQLVNEASTVPSDSQMSDSSGVSPMTNSSELKPESRDDPFCIGNLKSELLLNILKQDQHSQKITGVFELMRELTHMEYDLEKRGITSKVLPLQLENIFYKLLADGYSEKIEHVGDFNQKACSTSEMMEEKPHILGDIKSKEGNYYSPNLETVKEIGLESSTVWASTLPRDEKLKDLCNDFPSHLECTSGSKEMASGDSSTEQFSSELQQCLQHTEKMHEYLTLLQDMKPPLDNQESLDNNLEALKNQLRQLETFELGLAPIAVILRKDMKLAEEFLKSLPSDFPRGHVEELSISHQSLKTAFSSLSNVSSERTKQIMLAIDSEMSKLAVSHEEFLHKLKSFSDWVSEKSKSVKDIEIVNVQDSEYVKKRLEFLKNVLKDLGHTKMQLETTAFDVQFFISEYAQDLSPNQSKQLLRLLNTTQKCFLDVQESVTTQVERLETQLHLEQDLDDQKIVAERQQEYKEKLQGICDLLTQTENRLIGHQEAFMIGDGTVELKKYQSKQEELQKDMQGSAQALAEVVKNTENFLKENGEKLSQEDKALIEQKLNEAKIKCEQLNLKAEQSKKELDKVVTTAIKEETEKVAAVKQLEESKTKIENLLDWLSNVDKDSERAGTKHKQVIEQNGTHFQEGDGKSAIGEEDEVNGNLLETDVDGQVGTTQENLNQQYQKVKAQHEKIISQHQAVIIATQSAQVLLEKQGQYLSPEEKEKLQKNMKELKVHYETALAESEKKMKLTHSLQEELEKFDADYTEFEHWLQQSEQELENLEAGADDINGLMTKLKRQKSFSEDVISHKGDLRYITISGNRVLEAAKSCSKRDGGKVDTSATHREVQRKLDHATDRFRSLYSKCNVLGNNLKDLVDKYQHYEDASCGLLAGLQACEATASKHLSEPIAVDPKNLQRQLEETKALQGQISSQQVAVEKLKKTAEVLLDARGSLLPAKNDIQKTLDDIVGRYEDLSKSVNERNEKLQITLTRSLSVQDGLDEMLDWMGNVESSLKEQDVGTGYCRSSEQYKCHE

SEQ ID NO: 20102 - protein, 7325 aa, Artificial Sequence
  Synthetic polypeptide
PLISDIHVTGESEDMSAKERLLLWTQQATEGYAGIRCENFTTCWRDGKLFNAIIHKYRPDLIDMNTVAVQSNLANLEHAFYVAEKIGVIRLLDPEDVDVSSPDEKSVITYVSSLYDAFPKVPEGGEGIGANDVEVKWIEYQNMVNYLIQWIRHHVTTMSERTFPNNPVELKALYNQYLQFKETEIPPKETEKSKIKRLYKLLEIWIEFGRIKLLQGYHPNDIEKEWGKLIIAMLEREKALRPEVERLEMLQQIANRVQRDSVICEDKLILAGNALQSDSKRLESGVQFQNEAEIAGYILECENLLRQHVIDVQILIDGKYYQADQLVQRVAKLRDEIMALRNECSSVYSKGRILTTEQTKLMISGITQSLNSGFAQTLHPSLTSGLTQSLTPSLTSSSMTSGLSSGMTSRLTPSVTPAYTPGFPSGLVPNFSSGVEPNSLQTLKLMQIRKPLLKSSLLDQNLTEEEINMKFVQDLLNWVDEMQVQLDRTEWGSDLPSVESHLENHKNVHRAIEEFESSLKEAKISEIQMTAPLKLTYAEKLHRLESQYAKLLNTSRNQERHLDTLHNFVSRATNELIWLNEKEEEEVAYDWSERNTNIARKKDYHAELMRELDQKEENIKSVQEIAEQLLLENHPARLTIEAYRAAMQTQWSWILQLCQCVEQHIKENTAYFEFFNDAKEATDYLRNLKDAIQRKYSCDRSSSIHKLEDLVQESMEEKEELLQYKSTIANLMGKAKTIIQLKPRNSDCPLKTSIPIKAICDYRQIEITIYKDDECVLANNSHRAKWKVISPTGNEAMVPSVCFTVPPPNKEAVDLANRIEQQYQNVLTLWHESHINMKSVVSWHYLINEIDRIRASNVASIKTMLPGEHQQVLSNLQSRFEDFLEDSQESQVFSGSDITQLEKEVNVCKQYYQELLKSAEREEQEESVYNLYISEVRNIRLRLENCEDRLIRQIRTPLERDDLHESVFRITEQEKLKKELERLKDDLGTITNKCEEFFSQAAASSSVPTLRSELNVVLQNMNQVYSMSSTYIDKLKTVNLVLKNTQAAEALVKLYETKLCEEEAVIADKNNIENLISTLKQWRSEVDEKRQVFHALEDELQKAKAISDEMFKTYKERDLDFDWHKEKADQLVERWQNVHVQIDNRLRDLEGIGKSLKYYRDTYHPLDDWIQQVETTQRKIQENQPENSKTLATQLNQQKMLVSEIEMKQSKMDECQKYAEQYSATVKDYELQTMTYRAMVDSQQKSPVKRRRMQSSADLIIQEFMDLRTRYTALVTLMTQYIKFAGDSLKRLEEEEKSLEEEKKEHVEKAKELQKWVSNISKTLKDAEKAGKPPFSKQKISSEEISTKKEQLSEALQTIQLFLAKHGDKMTDEERNELEKQVKTLQESYNLLFSESLKQLQESQTSGDVKVEEKLDKVIAGTIDQTTGEVLSVFQAVLRGLIDYDTGIRLLETQLMISGLISPELRKCFDLKDAKSHGLIDEQILCQLKELSKAKEIISAASPTTIPVLDALAQSMITESMAIKVLEILLSTGSLVIPATGEQLTLQKAFQQNLVSSALFSKVLERQNMCKDLIDPCTSEKVSLIDMVQRSTLQENTGMWLLPVRPQEGGRITLKCGRNISILRAAHEGLIDRETMFRLLSAQLLSGGLINSNSGQRMTVEEAVREGVIDRDTASSILTYQVQTGGIIQSNPAKRLTVDEAVQCDLITSSSALLVLEAQRGYVGLIWPHSGEIFPTSSSLQQELITNELAYKILNGRQKIAALYIPESSQVIGLDAAKQLGIIDNNTASILKNITLPDKMPDLGDLEACKNARRWLSFCKFQPSTVHDYRQEEDVFDGEEPVTTQTSEETKKLFLSYLMINSYMDANTGQRLLLYDGDLDEAVGMLLEGCHAEFDGNTAIKECLDVLSSSGVFLNNASGREKDECTATPSSFNKCHCGEPEHEETPENRKCAIDEEFNEMRNTVINSEFSQSGKLASTISIDPKVNSSPSVCVPSLISYLTQTELADISMLRSDSENILTNYENQSRVETNERANECSHSKNIQNFPSDLIENPIMKSKMSKFCGVNETENEDNTNRDSPIFDYSPRLSALLSHDKLMHSQGSFNDTHTPESNGNKCEAPALSFSDKTMLSGQRIGEKFQDQFLGIAAINISLPGEQYGQKSLNMISSNPQVQYHNDKYISNTSGEDEKTHPGFQQMPEDKEDESEIEEYSCAVTPGGDTDNAIVSLTCATPLLDETISASDYETSLLNDQQNNTGTDTDSDDDFYDTPLFEDDDHDSLLLDGDDRDCLHPEDYDTLQEENDETASPADVFYDVSKENENSMVPQGAPVGSLSVKNKAHCLQDFLMDVEKDELDSGEKIHLNPVGSDKVNGQSLETGSERECTNILEGDESDSLTDYDIVGGKESFTASLKFDDSGSWRGRKEEYVTGQEFHSDTDHLDSMQSEESYGDYIYDSNDQDDDDDDGIDEEGGGIRDENGKPRCQNVAEDMDIQLCASILNENSDENENINTMILLDKMHSCSSLEKQQRVNVVQLASPSENNLVTEKSNLPEYTTEIAGKSKENLLNHEMVLKDVLPPIIKDTESEKTFGPASISHDNNNISSTSELGTDLANTKVKLIQGSELPELTDSVKGKDEYFKNMTPKVDSSLDHIICTEPDLIGKPAEESHLSLIASVTDKDPQGNGSDLIKGRDGKSDILIEDETSIQKMYLGEGEVLVEGLVEEENRHLKLLPGKNTRDSFKLINSQFPFPQITNNEELNQKGSLKKATVTLKDEPNNLQIIVSKSPVQFENLEEIFDTSVSKEISDDITSDITSWEGNTHFEESFTDGPEKELDLFTYLKHCAKNIKAKDVAKPNEDVPSHVLITAPPMKEHLQLGVNNTKEKSTSTQKDSPLNDMIQSNDLCSKESISGGGTEISQFTPESIEATLSILSRKHVEDVGKNDFLQSERCANGLGNDNSSNTLNTDYSFLEINNKKERIEQQLPKEQALSPRSQEKEVQIPELSQVFVEDVKDILKSRLKEGHMNPQEVEEPSACADTKILIQNLIKRITTSQLVNEASTVPSDSQMSDSSGVSPMTNSSELKPESRDDPFCIGNLKSELLLNILKQDQHSQKITGVFELMRELTHMEYDLEKRGITSKVLPLQLENIFYKLLADGYSEKIEHVGDFNQKACSTSEMMEEKPHILGDIKSKEGNYYSPNLETVKEIGLESSTVWASTLPRDEKLKDLCNDFPSHLECTSGSKEMASGDSSTEQFSSELQQCLQHTEKMHEYLTLLQDMKPPLDNQESLDNNLEALKNQLRQLETFELGLAPIAVILRKDMKLAEEFLKSLPSDFPRGHVEELSISHQSLKTAFSSLSNVSSERTKQIMLAIDSEMSKLAVSHEEFLHKLKSFSDWVSEKSKSVKDIEIVNVQDSEYVKKRLEFLKNVLKDLGHTKMQLETTAFDVQFFISEYAQDLSPNQSKQLLRLLNTTQKCFLDVQESVTTQVERLETQLHLEQDLDDQKIVAERQQEYKEKLQGICDLLTQTENRLIGHQEAFMIGDGTVELKKYQSKQEELQKDMQGSAQALAEVVKNTENFLKENGEKLSQEDKALIEQKLNEAKIKCEQLNLKAEQSKKELDKVVTTAIKEETEKVAAVKQLEESKTKIENLLDWLSNVDKDSERAGTKHKQVIEQNGTHFQEGDGKSAIGEEDEVNGNLLETDVDGQVGTTQENLNQQYQKVKAQHEKIISQHQAVIIATQSAQVLLEKQGQYLSPEEKEKLQKNMKELKVHYETALAESEKKMKLTHSLQEELEKFDADYTEFEHWLQQSEQELENLEAGADDINGLMTKLKRQKSFSEDVISHKGDLRYITISGNRVLEAAKSCSKRDGGKVDTSATHREVQRKLDHATDRFRSLYSKCNVLGNNLKDLVDKYQHYEDASCGLLAGLQACEATASKHLSEPIAVDPKNLQRQLEETKALQGQISSQQVAVEKLKKTAEVLLDARGSLLPAKNDIQKTLDDIVGRYEDLSKSVNERNEKLQITLTRSLSVQDGLDEMLDWMGNVESSLKEQGQVPLNSTALQDIISKNIMLEQDIAGRQSSINAMNEKVKKFMETTDPSTASSLQAKMKDLSARFSEASHKHKETLAKMEELKTKVELFENLSEKLQTFLETKTQALTEVDVPGKDVTELSQYMQESTSEFLEHKKHLEVLHSLLKEISSHGLPSDKALVLEKTNNLSKKFKEMEDTIKEKKEAVTSCQEQLDAFQVLVKSLKSWIKETTKKVPIVQPSFGAEDLGKSLEDTKKLQEKWSLKTPEIQKVNNSGISLCNLISAVTTPAKAIAAVKSGGAVLNGEGTATNTEEFWANKGLTSIKKDMTDISHGYEDLGLLLKDKIAELNTKLSKLQKAQEESSAMMQWLQKMNKTATKWQQTPAPTDTEAVKTQVEQNKSFEAELKQNVNKVQELKDKLTELLEENPDTPEAPRWKQMLTEIDSKWQELNQLTIDRQQKLEESSNNLTQFQTVEAQLKQWLVEKELMVSVLGPLSIDPNMLNTQRQQVQILLQEFATRKPQYEQLTAAGQGILSRPGEDPSLRGIVKEQLAAVTQKWDSLTGQLSDRCDWIDQAIVKSTQYQSLLRSLSDKLSDLDNKLSSSLAVSTHPDAMNQQLETAQKMKQEIQQEKKQIKVAQALCEDLSALVKEEYLKAELSRQLEGILKSFKDVEQKAENHVQHLQSACASSHQFQQMSRDFQAWLDTKKEEQNKSHPISAKLDVLESLIKDHKDFSKTLTAQSHMYEKTIAEGENLLLKTQGSEKAALQLQLNTIKTNWDTFNKQVKERENKLKESLEKALKYKEQVETLWPWIDKCQNNLEEIKFCLDPAEGENSIAKLKSLQKEMDQHFGMVELLNNTANSLLSVCEIDKEVVTDENKSLIQKVDMVTEQLHSKKFCLENMTQKFKEFQEVSKESKRQLQCAKEQLDIHDSLGSQAYSNKYLTMLQTQQKSLQALKHQVDLAKRLAQDLVVEASDSKGTSDVLLQVETIAQEHSTLSQQVDEKCSFLETKLQGIGHFQNTIREMFSQFAEFDDELDSMAPVGRDAETLQKQKETIKAFLKKLEALMASNDNANKTCKMMLATEETSPDLVGIKRDLEALSKQCNKLLDRAQAREEQVEGTIKRLEEFYSKLKEFSILLQKAEEHEESQGPVGMETETINQQLNMFKVFQKEEIEPLQGKQQDVNWLGQGLIQSAAKSTSTQGLEHDLDDVNARWKTLNKKVAQRAAQLQEALLHCGRFQDALESLLSWMVDTEELVANQKPPSAEFKVVKAQIQEQKLLQRLLDDRKSTVEVIKREGEKIATTAEPADKVKILKQLSLLDSRWEALLNKAETRNRQLEGISVVAQQFHETLEPLNEWLTTIEKRLVNCEPIGTQASKLEEQIAQHKVLQEDILLRKQNVDQALLNGLELLKQTTGDEVLIIQDKLEAIKARYKDITKLSTDVAKTLEQALQLARRLHSTHEELCTWLDKVEVELLSYETQVLKGEEASQAQMRPKELKKEAKNNKALLDSLNEVSSALLELVPWRAREGLEKMVAEDNERYRLVSDTITQKVEEIDAAILRSQQFDQAADAELSWITETEKKLMSLGDIRLEQDQTSAQLQVQKTFTMEILRHKDIIDDLVKSGHKIMTACSEEEKQSMKKKLDKVLKNYDTICQINSERYLQLERAQSLVNQFWETYEELWPWLTETQSIISQLPAPALEYETLRQQQEEHRQLRELIAEHKPHIDKMNKTGPQLLELSPGEGFSIQEKYVAADTLYSQIKEDVKKRAVALDEAISQSTQFHDKIDQILESLERIVERLRQPPSISAEVEKIKEQISENKNVSVDMEKLQPLYETLKQRGEEMIARSGGTDKDISAKAVQDKLDQMVFIWENIHTLVEEREAKLLDVMELAEKFWCDHMSLIVTIKDTQDFIRDLEDPGIDPSVVKQQQEAAETIREEIDGLQEELDIVINLGSELIAACGEPDKPIVKKSIDELNSAWDSLNKAWKDRIDKLEEAMQAAVQYQDGLQAVFDWVDIAGGKLASMSPIGTDLETVKQQIEELKQFKSEAYQQQIEMERLNHQAELLLKKVTEESDKHTVQDPLMELKLIWDSLEERIINRQHKLEGALLALGQFQHALDELLAWLTHTEGLLSEQKPVGGDPKAIEIELAKHHVLQNDVLAHQSTVEAVNKAGNDLIESSAGEEASNLQNKLEVLNQRWQNVLEKTEQRKQQLDGALRQAKGFHGEIEDLQQWLTDTERHLLASKPLGGLPETAKEQLNVHMEVCAAFEAKEETYKSLMQKGQQMLARCPKSAETNIDQDINNLKEKWESVETKLNERKTKLEEALNLAMEFHNSLQDFINWLTQAEQTLNVASRPSLILDTVLFQIDEHKVFANEVNSHREQIIELDKTGTHLKYFSQKQDVVLIKNLLISVQSRWEKVVQRLVERGRSLDDARKRAKQFHEAWSKLMEWLEESEKSLDSELEIANDPDKIKTQLAQHKEFQKSLGAKHSVYDTTNRTGRSLKEKTSLADDNLKLDDMLSELRDKWDTICGKSVERQNKLEEALLFSGQFTDALQALIDWLYRVEPQLAEDQPVHGDIDLVMNLIDNHKAFQKELGKRTSSVQALKRSARELIEGSRDDSSWVKVQMQELSTRWETVCALSISKQTRLEAALRQAEEFHSVVHALLEWLAEAEQTLRFHGVLPDDEDALRTLIDQHKEFMKKLEEKRAELNKATTMGDTVLAICHPDSITTIKHWITIIRARFEEVLAWAKQHQQRLASALAGLIAKQELLEALLAWLQWAETTLTDKDKEVIPQEIEEVKALIAEHQTFMEEMTRKQPDVDKVTKTYKRRAADPSSLQSHIPVLDKGRAGRKRFPASSLYPSGSQTQIETKNPRVNLLVSKWQQVWLLALERRRKLNDALDRLEELREFANFDFDIWRKKYMRWMNHKKSRVMDFFRRIDKDQDGKITRQEFIDGILSSKFPTSRLEMSAVADIFDRDGDGYIDYYEFVAALHPNKDAYKPITDADKIEDEVTRQVAKCKCAKRFQVEQIGDNKYRFFLGNQFGDSQQLRLVRILRSTVMVRVGGGWMALDEFLVKNDPCRVHHHGSKMLRSESNSSITTTQPTIAKGRTNMELREKFILADGASQGMAAFRPRGRRSRPSSRGASPNRSTSVSSQAAQAASPQVPATTTPKGTPIQGSKLRLPGYLSGKGFHSGEDSGLITTAAARVRTQFADSKKTPSRPGSRAGSKAGSRASSRRGSDASDFDISEIQSVCSDVETVPQTHRPTPRAGSRPSTAKPSKIPTPQRKSPASKLDKSSKR

SEQ ID NO: 20103 - protein, 12 aa, Artificial Sequence
  Synthetic polypeptide
SQLWNYCVTPDI

SEQ ID NO: 20104 - protein, 131 aa, Artificial Sequence
  Synthetic polypeptide
DERDKVQKKTFTKWINQHLMKVRKHVNDLYEDLRDGHNLISLLEVLSGDTLPREKGRMRFHRLQNVQIALDYLKRRQVKLVNIRNDDITDGNPKLTLGLIWTIILHFQISDIHVTGESEDMSAKERLLLWT

SEQ ID NO: 20105 - protein, 481 aa, Artificial Sequence
  Synthetic polypeptide
DERDKVQKKTFTKWINQHLMKVRKHVNDLYEDLRDGHNLISLLEVLSGDTLPREKGRMRFHRLQNVQIALDYLKRRQVKLVNIRNDDITDGNPKLTLGLIWTIILHFQISDIHVTGESEDMSAKERLLLWTQQATEGYAGIRCENFTTCWRDGKLFNAIIHKYRPDLIDMNTVAVQSNLANLEHAFYVAEKIGVIRLLDPEDVDVSSPDEKSVITYVSSLYDAFPKVPEGGEGIGANDVEVKWIEYQNMVNYLIQWIRHHVTTMSERTFPNNPVELKALYNQYLQFKETEIPPKETEKSKIKRLYKLLEIWIEFGRIKLLQGYHPNDIEKEWGKLIIAMLEREKALRPEVERLEMLQQIANRVQRDSVICEDKLILAGNALQSDSKRLESGVQFQNEAEIAGYILECENLLRQHVIDVQILIDGKYYQADQLVQRVAKLRDEIMALRNECSSVYSKGRILTTEQTKLMISGITQSLNSGFA

SEQ ID NO: 20106 - protein, 1409 aa, Artificial Sequence
  Synthetic polypeptide
DERDKVQKKTFTKWINQHLMKVRKHVNDLYEDLRDGHNLISLLEVLSGDTLPREKGRMRFHRLQNVQIALDYLKRRQVKLVNIRNDDITDGNPKLTLGLIWTIILHFQISDIHVTGESEDMSAKERLLLWTQQATEGYAGIRCENFTTCWRDGKLFNAIIHKYRPDLIDMNTVAVQSNLANLEHAFYVAEKIGVIRLLDPEDVDVSSPDEKSVITYVSSLYDAFPKVPEGGEGIGANDVEVKWIEYQNMVNYLIQWIRHHVTTMSERTFPNNPVELKALYNQYLQFKETEIPPKETEKSKIKRLYKLLEIWIEFGRIKLLQGYHPNDIEKEWGKLIIAMLEREKALRPEVERLEMLQQIANRVQRDSVICEDKLILAGNALQSDSKRLESGVQFQNEAEIAGYILECENLLRQHVIDVQILIDGKYYQADQLVQRVAKLRDEIMALRNECSSVYSKGRILTTEQTKLMISGITQSLNSGFAQTLHPSLTSGLTQSLTPSLTSSSMTSGLSSGMTSRLTPSVTPAYTPGFPSGLVPNFSSGVEPNSLQTLKLMQIRKPLLKSSLLDQNLTEEEINMKFVQDLLNWVDEMQVQLDRTEWGSDLPSVESHLENHKNVHRAIEEFESSLKEAKISEIQMTAPLKLTYAEKLHRLESQYAKLLNTSRNQERHLDTLHNFVSRATNELIWLNEKEEEEVAYDWSERNTNIARKKDYHAELMRELDQKEENIKSVQEIAEQLLLENHPARLTIEAYRAAMQTQWSWILQLCQCVEQHIKENTAYFEFFNDAKEATDYLRNLKDAIQRKYSCDRSSSIHKLEDLVQESMEEKEELLQYKSTIANLMGKAKTIIQLKPRNSDCPLKTSIPIKAICDYRQIEITIYKDDECVLANNSHRAKWKVISPTGNEAMVPSVCFTVPPPNKEAVDLANRIEQQYQNVLTLWHESHINMKSVVSWHYLINEIDRIRASNVASIKTMLPGEHQQVLSNLQSRFEDFLEDSQESQVFSGSDITQLEKEVNVCKQYYQELLKSAEREEQEESVYNLYISEVRNIRLRLENCEDRLIRQIRTPLERDDLHESVFRITEQEKLKKELERLKDDLGTITNKCEEFFSQAAASSSVPTLRSELNVVLQNMNQVYSMSSTYIDKLKTVNLVLKNTQAAEALVKLYETKLCEEEAVIADKNNIENLISTLKQWRSEVDEKRQVFHALEDELQKAKAISDEMFKTYKERDLDFDWHKEKADQLVERWQNVHVQIDNRLRDLEGIGKSLKYYRDTYHPLDDWIQQVETTQRKIQENQPENSKTLATQLNQQKMLVSEIEMKQSKMDECQKYAEQYSATVKDYELQTMTYRAMVDSQQKSPVKRRRMQSSADLIIQEFMDLRTRYTALVTLMTQYIKFAGDSLKRLEEEEKSLEEEK

SEQ ID NO: 20107 - protein, 5427 aa, Artificial Sequence
  Synthetic polypeptide
DERDKVQKKTFTKWINQHLMKVRKHVNDLYEDLRDGHNLISLLEVLSGDTLPREKGRMRFHRLQNVQIALDYLKRRQVKLVNIRNDDITDGNPKLTLGLIWTIILHFQISDIHVTGESEDMSAKERLLLWTQQATEGYAGIRCENFTTCWRDGKLFNAIIHKYRPDLIDMNTVAVQSNLANLEHAFYVAEKIGVIRLLDPEDVDVSSPDEKSVITYVSSLYDAFPKVPEGGEGIGANDVEVKWIEYQNMVNYLIQWIRHHVTTMSERTFPNNPVELKALYNQYLQFKETEIPPKETEKSKIKRLYKLLEIWIEFGRIKLLQGYHPNDIEKEWGKLIIAMLEREKALRPEVERLEMLQQIANRVQRDSVICEDKLILAGNALQSDSKRLESGVQFQNEAEIAGYILECENLLRQHVIDVQILIDGKYYQADQLVQRVAKLRDEIMALRNECSSVYSKGRILTTEQTKLMISGITQSLNSGFAQTLHPSLTSGLTQSLTPSLTSSSMTSGLSSGMTSRLTPSVTPAYTPGFPSGLVPNFSSGVEPNSLQTLKLMQIRKPLLKSSLLDQNLTEEEINMKFVQDLLNWVDEMQVQLDRTEWGSDLPSVESHLENHKNVHRAIEEFESSLKEAKISEIQMTAPLKLTYAEKLHRLESQYAKLLNTSRNQERHLDTLHNFVSRATNELIWLNEKEEEEVAYDWSERNTNIARKKDYHAELMRELDQKEENIKSVQEIAEQLLLENHPARLTIEAYRAAMQTQWSWILQLCQCVEQHIKENTAYFEFFNDAKEATDYLRNLKDAIQRKYSCDRSSSIHKLEDLVQESMEEKEELLQYKSTIANLMGKAKTIIQLKPRNSDCPLKTSIPIKAICDYRQIEITIYKDDECVLANNSHRAKWKVISPTGNEAMVPSVCFTVPPPNKEAVDLANRIEQQYQNVLTLWHESHINMKSVVSWHYLINEIDRIRASNVASIKTMLPGEHQQVLSNLQSRFEDFLEDSQESQVFSGSDITQLEKEVNVCKQYYQELLKSAEREEQEESVYNLYISEVRNIRLRLENCEDRLIRQIRTPLERDDLHESVFRITEQEKLKKELERLKDDLGTITNKCEEFFSQAAASSSVPTLRSELNVVLQNMNQVYSMSSTYIDKLKTVNLVLKNTQAAEALVKLYETKLCEEEAVIADKNNIENLISTLKQWRSEVDEKRQVFHALEDELQKAKAISDEMFKTYKERDLDFDWHKEKADQLVERWQNVHVQIDNRLRDLEGIGKSLKYYRDTYHPLDDWIQQVETTQRKIQENQPENSKTLATQLNQQKMLVSEIEMKQSKMDECQKYAEQYSATVKDYELQTMTYRAMVDSQQKSPVKRRRMQSSADLIIQEFMDLRTRYTALVTLMTQYIKFAGDSLKRLEEEEKSLEEEKKEHVEKAKELQKWVSNISKTLKDAEKAGKPPFSKQKISSEEISTKKEQLSEALQTIQLFLAKHGDKMTDEERNELEKQVKTLQESYNLLFSESLKQLQESQTSGDVKVEEKIVAERQQEYKEKLQGICDLLTQTENRLIGHQEAFMIGDGTVELKKYQSKQEELQKDMQGSAQALAEVVKNTENFLKENGEKLSQEDKALIEQKLNEAKIKCEQLNLKAEQSKKELDKVVTTAIKEETEKVAAVKQLEESKTKIENLLDWLSNVDKDSERAGTKHKQVIEQNGTHFQEGDGKSAIGEEDEVNGNLLETDVDGQVGTTQENLNQQYQKVKAQHEKIISQHQAVIIATQSAQVLLEKQGQYLSPEEKEKLQKNMKELKVHYETALAESEKKMKLTHSLQEELEKFDADYTEFEHWLQQSEQELENLEAGADDINGLMTKLKRQKSFSEDVISHKGDLRYITISGNRVLEAAKSCSKRDGGKVDTSATHREVQRKLDHATDRFRSLYSKCNVLGNNLKDLVDKYQHYEDASCGLLAGLQACEATASKHLSEPIAVDPKNLQRQLEETKALQGQISSQQVAVEKLKKTAEVLLDARGSLLPAKNDIQKTLDDIVGRYEDLSKSVNERNEKLQITLTRSLSVQDGLDEMLDWMGNVESSLKEQGQVPLNSTALQDIISKNIMLEQDIAGRQSSINAMNEKVKKFMETTDPSTASSLQAKMKDLSARFSEASHKHKETLAKMEELKTKVELFENLSEKLQTFLETKTQALTEVDVPGKDVTELSQYMQESTSEFLEHKKHLEVLHSLLKEISSHGLPSDKALVLEKTNNLSKKFKEMEDTIKEKKEAVTSCQEQLDAFQVLVKSLKSWIKETTKKVPIVQPSFGAEDLGKSLEDTKKLQEKWSLKTPEIQKVNNSGISLCNLISAVTTPAKAIAAVKSGGAVLNGEGTATNTEEFWANKGLTSIKKDMTDISHGYEDLGLLLKDKIAELNTKLSKLQKAQEESSAMMQWLQKMNKTATKWQQTPAPTDTEAVKTQVEQNKSFEAELKQNVNKVQELKDKLTELLEENPDTPEAPRWKQMLTEIDSKWQELNQLTIDRQQKLEESSNNLTQFQTVEAQLKQWLVEKELMVSVLGPLSIDPNMLNTQRQQVQILLQEFATRKPQYEQLTAAGQGILSRPGEDPSLRGIVKEQLAAVTQKWDSLTGQLSDRCDWIDQAIVKSTQYQSLLRSLSDKLSDLDNKLSSSLAVSTHPDAMNQQLETAQKMKQEIQQEKKQIKVAQALCEDLSALVKEEYLKAELSRQLEGILKSFKDVEQKAENHVQHLQSACASSHQFQQMSRDFQAWLDTKKEEQNKSHPISAKLDVLESLIKDHKDFSKTLTAQSHMYEKTIAEGENLLLKTQGSEKAALQLQLNTIKTNWDTFNKQVKERENKLKESLEKALKYKEQVETLWPWIDKCQNNLEEIKFCLDPAEGENSIAKLKSLQKEMDQHFGMVELLNNTANSLLSVCEIDKEVVTDENKSLIQKVDMVTEQLHSKKFCLENMTQKFKEFQEVSKESKRQLQCAKEQLDIHDSLGSQAYSNKYLTMLQTQQKSLQALKHQVDLAKRLAQDLVVEASDSKGTSDVLLQVETIAQEHSTLSQQVDEKCSFLETKLQGIGHFQNTIREMFSQFAEFDDELDSMAPVGRDAETLQKQKETIKAFLKKLEALMASNDNANKTCKMMLATEETSPDLVGIKRDLEALSKQCNKLLDRAQAREEQVEGTIKRLEEFYSKLKEFSILLQKAEEHEESQGPVGMETETINQQLNMFKVFQKEEIEPLQGKQQDVNWLGQGLIQSAAKSTSTQGLEHDLDDVNARWKTLNKKVAQRAAQLQEALLHCGRFQDALESLLSWMVDTEELVANQKPPSAEFKVVKAQIQEQKLLQRLLDDRKSTVEVIKREGEKIATTAEPADKVKILKQLSLLDSRWEALLNKAETRNRQLEGISVVAQQFHETLEPLNEWLTTIEKRLVNCEPIGTQASKLEEQIAQHKALEDDIINHNKHLHQAVSIGQSLKVLSSREDKDMVQSKLDFSQVWYIEIQEKSHSRSELLQQALCNAKIFGEDEVELMNWLNEVHDKLSKLSVQDYSTEGLWKQQSELRVLQEDILLRKQNVDQALLNGLELLKQTTGDEVLIIQDKLEAIKARYKDITKLSTDVAKTLEQALQLARRLHSTHEELCTWLDKVEVELLSYETQVLKGEEASQAQMRPKELKKEAKNNKALLDSLNEVSSALLELVPWRAREGLEKMVAEDNERYRLVSDTITQKVEEIDAAILRSQQFDQAADAELSWITETEKKLMSLGDIRLEQDQTSAQLQVQKTFTMEILRHKDIIDDLVKSGHKIMTACSEEEKQSMKKKLDKVLKNYDTICQINSERYLQLERAQSLVNQFWETYEELWPWLTETQSIISQLPAPALEYETLRQQQEEHRQLRELIAEHKPHIDKMNKTGPQLLELSPGEGFSIQEKYVAADTLYSQIKEDVKKRAVALDEAISQSTQFHDKIDQILESLERIVERLRQPPSISAEVEKIKEQISENKNVSVDMEKLQPLYETLKQRGEEMIARSGGTDKDISAKAVQDKLDQMVFIWENIHTLVEEREAKLLDVMELAEKFWCDHMSLIVTIKDTQDFIRDLEDPGIDPSVVKQQQEAAETIREEIDGLQEELDIVINLGSELIAACGEPDKPIVKKSIDELNSAWDSLNKAWKDRIDKLEEAMQAAVQYQDGLQAVFDWVDIAGGKLASMSPIGTDLETVKQQIEELKQFKSEAYQQQIEMERLNHQAELLLKKVTEESDKHTVQDPLMELKLIWDSLEERIINRQHKLEGALLALGQFQHALDELLAWLTHTEGLLSEQKPVGGDPKAIEIELAKHHVLQNDVLAHQSTVEAVNKAGNDLIESSAGEEASNLQNKLEVLNQRWQNVLEKTEQRKQQLDGALRQAKGFHGEIEDLQQWLTDTERHLLASKPLGGLPETAKEQLNVHMEVCAAFEAKEETYKSLMQKGQQMLARCPKSAETNIDQDINNLKEKWESVETKLNERKTKLEEALNLAMEFHNSLQDFINWLTQAEQTLNVASRPSLILDTVLFQIDEHKVFANEVNSHREQIIELDKTGTHLKYFSQKQDVVLIKNLLISVQSRWEKVVQRLVERGRSLDDARKRAKQFHEAWSKLMEWLEESEKSLDSELEIANDPDKIKTQLAQHKEFQKSLGAKHSVYDTTNRTGRSLKEKTSLADDNLKLDDMLSELRDKWDTICGKSVERQNKLEEALLFSGQFTDALQALIDWLYRVEPQLAEDQPVHGDIDLVMNLIDNHKAFQKELGKRTSSVQALKRSARELIEGSRDDSSWVKVQMQELSTRWETVCALSISKQTRLEAALRQAEEFHSVVHALLEWLAEAEQTLRFHGVLPDDEDALRTLIDQHKEFMKKLEEKRAELNKATTMGDTVLAICHPDSITTIKHWITIIRARFEEVLAWAKQHQQRLASALAGLIAKQELLEALLAWLQWAETTLTDKDKEVIPQEIEEVKALIAEHQTFMEEMTRKQPDVDKVTKTYKRRAADPSSLQSHIPVLDKGRAGRKRFPASSLYPSGSQTQIETKNPRVNLLLREFANFDFDIWRKKYMRWMNHKKSRVMDFFRRIDKDQDGKITRQEFIDGILSSKFPTSRLEMSAVADIFDRDGDGYIDYYEFVAALHPNKDAYKPITDADKIEDEVTRQVAKCKCAKRFQVEQIGDNKYRVSFQSNFGDSQQLRLVRILRSTVMVRVGGGWMALDEFLVKNDPCRVHHHGSKMLRSESNSSITTTQPTIAKGRTNMELREKFILADGASQGMAAFRPRGRRSRPSSRGASPNRSTSVSSQAAQAASPQVPATTTPKGTPIQGSKLRLPGYLSGKGFHSGEDSGLITTAAARVRTQFADSKKTPSRPGSRAGSKAGSRASSRRGSDASDFDISEIQSVCSDVETVPQTHRPTPRAGSRPSTAKPSKIPTPQRKSPASKLDKSSKR

SEQ ID NO: 20108 - protein, 5345 aa, Artificial Sequence
  Synthetic polypeptide
DERDKVQKKTFTKWINQHLMKVRKHVNDLYEDLRDGHNLISLLEVLSGDTLPREKGRMRFHRLQNVQIALDYLKRRQVKLVNIRNDDITDGNPKLTLGLIWTIILHFQISDIHVTGESEDMSAKERLLLWTQQATEGYAGIRCENFTTCWRDGKLFNAIIHKYRPDLIDMNTVAVQSNLANLEHAFYVAEKIGVIRLLDPEDVDVSSPDEKSVITYVSSLYDAFPKVPEGGEGIGANDVEVKWIEYQNMVNYLIQWIRHHVTTMSERTFPNNPVELKALYNQYLQFKETEIPPKETEKSKIKRLYKLLEIWIEFGRIKLLQGYHPNDIEKEWGKLIIAMLEREKALRPEVERLEMLQQIANRVQRDSVICEDKLILAGNALQSDSKRLESGVQFQNEAEIAGYILECENLLRQHVIDVQILIDGKYYQADQLVQRVAKLRDEIMALRNECSSVYSKGRILTTEQTKLMISGITQSLNSGFAQTLHPSLTSGLTQSLTPSLTSSSMTSGLSSGMTSRLTPSVTPAYTPGFPSGLVPNFSSGVEPNSLQTLKLMQIRKPLLKSSLLDQNLTEEEINMKFVQDLLNWVDEMQVQLDRTEWGSDLPSVESHLENHKNVHRAIEEFESSLKEAKISEIQMTAPLKLTYAEKLHRLESQYAKLLNTSRNQERHLDTLHNFVSRATNELIWLNEKEEEEVAYDWSERNTNIARKKDYHAELMRELDQKEENIKSVQEIAEQLLLENHPARLTIEAYRAAMQTQWSWILQLCQCVEQHIKENTAYFEFFNDAKEATDYLRNLKDAIQRKYSCDRSSSIHKLEDLVQESMEEKEELLQYKSTIANLMGKAKTIIQLKPRNSDCPLKTSIPIKAICDYRQIEITIYKDDECVLANNSHRAKWKVISPTGNEAMVPSVCFTVPPPNKEAVDLANRIEQQYQNVLTLWHESHINMKSVVSWHYLINEIDRIRASNVASIKTMLPGEHQQVLSNLQSRFEDFLEDSQESQVFSGSDITQLEKEVNVCKQYYQELLKSAEREEQEESVYNLYISEVRNIRLRLENCEDRLIRQIRTPLERDDLHESVFRITEQEKLKKELERLKDDLGTITNKCEEFFSQAAASSSVPTLRSELNVVLQNMNQVYSMSSTYIDKLKTVNLVLKNTQAAEALVKLYETKLCEEEAVIADKNNIENLISTLKQWRSEVDEKRQVFHALEDELQKAKAISDEMFKTYKERDLDFDWHKEKADQLVERWQNVHVQIDNRLRDLEGIGKSLKYYRDTYHPLDDWIQQVETTQRKIQENQPENSKTLATQLNQQKMLVSEIEMKQSKMDECQKYAEQYSATVKDYELQTMTYRAMVDSQQKSPVKRRRMQSSADLIIQEFMDLRTRYTALVTLMTQYIKFAGDSLKRLEEEEKSLEEEKKEHVEKAKELQKWVSNISKTLKDAEKAGKPPFSKQKISSEEISTKKEQLSEALQTIQLFLAKHGDKMTDEERNELEKQVKTLQESYNLLFSESLKQLQESQTSGDVKVEEKIVAERQQEYKEKLQGICDLLTQTENRLIGHQEAFMIGDGTVELKKYQSKQEELQKDMQGSAQALAEVVKNTENFLKENGEKLSQEDKALIEQKLNEAKIKCEQLNLKAEQSKKELDKVVTTAIKEETEKVAAVKQLEESKTKIENLLDWLSNVDKDSERAGTKHKQVIEQNGTHFQEGDGKSAIGEEDEVNGNLLETDVDGQVGTTQENLNQQYQKVKAQHEKIISQHQAVIIATQSAQVLLEKQGQYLSPEEKEKLQKNMKELKVHYETALAESEKKMKLTHSLQEELEKFDADYTEFEHWLQQSEQELENLEAGADDINGLMTKLKRQKSFSEDVISHKGDLRYITISGNRVLEAAKSCSKRDGGKVDTSATHREVQRKLDHATDRFRSLYSKCNVLGNNLKDLVDKYQHYEDASCGLLAGLQACEATASKHLSEPIAVDPKNLQRQLEETKALQGQISSQQVAVEKLKKTAEVLLDARGSLLPAKNDIQKTLDDIVGRYEDLSKSVNERNEKLQITLTRSLSVQDGLDEMLDWMGNVESSLKEQGQVPLNSTALQDIISKNIMLEQDIAGRQSSINAMNEKVKKFMETTDPSTASSLQAKMKDLSARFSEASHKHKETLAKMEELKTKVELFENLSEKLQTFLETKTQALTEVDVPGKDVTELSQYMQESTSEFLEHKKHLEVLHSLLKEISSHGLPSDKALVLEKTNNLSKKFKEMEDTIKEKKEAVTSCQEQLDAFQVLVKSLKSWIKETTKKVPIVQPSFGAEDLGKSLEDTKKLQEKWSLKTPEIQKVNNSGISLCNLISAVTTPAKAIAAVKSGGAVLNGEGTATNTEEFWANKGLTSIKKDMTDISHGYEDLGLLLKDKIAELNTKLSKLQKAQEESSAMMQWLQKMNKTATKWQQTPAPTDTEAVKTQVEQNKSFEAELKQNVNKVQELKDKLTELLEENPDTPEAPRWKQMLTEIDSKWQELNQLTIDRQQKLEESSNNLTQFQTVEAQLKQWLVEKELMVSVLGPLSIDPNMLNTQRQQVQILLQEFATRKPQYEQLTAAGQGILSRPGEDPSLRGIVKEQLAAVTQKWDSLTGQLSDRCDWIDQAIVKSTQYQSLLRSLSDKLSDLDNKLSSSLAVSTHPDAMNQQLETAQKMKQEIQQEKKQIKVAQALCEDLSALVKEEYLKAELSRQLEGILKSFKDVEQKAENHVQHLQSACASSHQFQQMSRDFQAWLDTKKEEQNKSHPISAKLDVLESLIKDHKDFSKTLTAQSHMYEKTIAEGENLLLKTQGSEKAALQLQLNTIKTNWDTFNKQVKERENKLKESLEKALKYKEQVETLWPWIDKCQNNLEEIKFCLDPAEGENSIAKLKSLQKEMDQHFGMVELLNNTANSLLSVCEIDKEVVTDENKSLIQKVDMVTEQLHSKKFCLENMTQKFKEFQEVSKESKRQLQCAKEQLDIHDSLGSQAYSNKYLTMLQTQQKSLQALKHQVDLAKRLAQDLVVEASDSKGTSDVLLQVETIAQEHSTLSQQVDEKCSFLETKLQGIGHFQNTIREMFSQFAEFDDELDSMAPVGRDAETLQKQKETIKAFLKKLEALMASNDNANKTCKMMLATEETSPDLVGIKRDLEALSKQCNKLLDRAQAREEQVEGTIKRLEEFYSKLKEFSILLQKAEEHEESQGPVGMETETINQQLNMFKVFQKEEIEPLQGKQQDVNWLGQGLIQSAAKSTSTQGLEHDLDDVNARWKTLNKKVAQRAAQLQEALLHCGRFQDALESLLSWMVDTEELVANQKPPSAEFKVVKAQIQEQKLLQRLLDDRKSTVEVIKREGEKIATTAEPADKVKILKQLSLLDSRWEALLNKAETRNRQLEGISVVAQQFHETLEPLNEWLTTIEKRLVNCEPIGTQASKLEEQIAQHKVLQEDILLRKQNVDQALLNGLELLKQTTGDEVLIIQDKLEAIKARYKDITKLSTDVAKTLEQALQLARRLHSTHEELCTWLDKVEVELLSYETQVLKGEEASQAQMRPKELKKEAKNNKALLDSLNEVSSALLELVPWRAREGLEKMVAEDNERYRLVSDTITQKVEEIDAAILRSQQFDQAADAELSWITETEKKLMSLGDIRLEQDQTSAQLQVQKTFTMEILRHKDIIDDLVKSGHKIMTACSEEEKQSMKKKLDKVLKNYDTICQINSERYLQLERAQSLVNQFWETYEELWPWLTETQSIISQLPAPALEYETLRQQQEEHRQLRELIAEHKPHIDKMNKTGPQLLELSPGEGFSIQEKYVAADTLYSQIKEDVKKRAVALDEAISQSTQFHDKIDQILESLERIVERLRQPPSISAEVEKIKEQISENKNVSVDMEKLQPLYETLKQRGEEMIARSGGTDKDISAKAVQDKLDQMVFIWENIHTLVEEREAKLLDVMELAEKFWCDHMSLIVTIKDTQDFIRDLEDPGIDPSVVKQQQEAAETIREEIDGLQEELDIVINLGSELIAACGEPDKPIVKKSIDELNSAWDSLNKAWKDRIDKLEEAMQAAVQYQDGLQAVFDWVDIAGGKLASMSPIGTDLETVKQQIEELKQFKSEAYQQQIEMERLNHQAELLLKKVTEESDKHTVQDPLMELKLIWDSLEERIINRQHKLEGALLALGQFQHALDELLAWLTHTEGLLSEQKPVGGDPKAIEIELAKHHVLQNDVLAHQSTVEAVNKAGNDLIESSAGEEASNLQNKLEVLNQRWQNVLEKTEQRKQQLDGALRQAKGFHGEIEDLQQWLTDTERHLLASKPLGGLPETAKEQLNVHMEVCAAFEAKEETYKSLMQKGQQMLARCPKSAETNIDQDINNLKEKWESVETKLNERKTKLEEALNLAMEFHNSLQDFINWLTQAEQTLNVASRPSLILDTVLFQIDEHKVFANEVNSHREQIIELDKTGTHLKYFSQKQDVVLIKNLLISVQSRWEKVVQRLVERGRSLDDARKRAKQFHEAWSKLMEWLEESEKSLDSELEIANDPDKIKTQLAQHKEFQKSLGAKHSVYDTTNRTGRSLKEKTSLADDNLKLDDMLSELRDKWDTICGKSVERQNKLEEALLFSGQFTDALQALIDWLYRVEPQLAEDQPVHGDIDLVMNLIDNHKAFQKELGKRTSSVQALKRSARELIEGSRDDSSWVKVQMQELSTRWETVCALSISKQTRLEAALRQAEEFHSVVHALLEWLAEAEQTLRFHGVLPDDEDALRTLIDQHKEFMKKLEEKRAELNKATTMGDTVLAICHPDSITTIKHWITIIRARFEEVLAWAKQHQQRLASALAGLIAKQELLEALLAWLQWAETTLTDKDKEVIPQEIEEVKALIAEHQTFMEEMTRKQPDVDKVTKTYKRRAADPSSLQSHIPVLDKGRAGRKRFPASSLYPSGSQTQIETKNPRVNLLVSKWQQVWLLALERRRKLNDALDRLEELREFANFDFDIWRKKYMRWMNHKKSRVMDFFRRIDKDQDGKITRQEFIDGILSSKFPTSRLEMSAVADIFDRDGDGYIDYYEFVAALHPNKDAYKPITDADKIEDEVTRQVAKCKCAKRFQVEQIGDNKYRFFLGNQFGDSQQLRLVRILRSTVMVRVGGGWMALDEFLVKNDPCRVHHHGSKMLRSESNSSITTTQPTIAKGRTNMELREKFILADGASQGMAAFRPRGRRSRPSSRGASPNRSTSVSSQAAQAASPQVPATTTPKGTPIQGSKLRLPGYLSGKGFHSGEDSGLITTAAARVRTQFADSKKTPSRPGSRAGSKAGSRASSRRGSDASDFDISEIQSVCSDVETVPQTHRPTPRAGSRPSTAKPSKIPTPQRKSPASKLDKSSKR

SEQ ID NO: 20109 - protein, 7542 aa, Artificial Sequence
  Synthetic polypeptide
DERDKVQKKTFTKWINQHLMKVRKHVNDLYEDLRDGHNLISLLEVLSGDTLPREKGRMRFHRLQNVQIALDYLKRRQVKLVNIRNDDITDGNPKLTLGLIWTIILHFQISDIHVTGESEDMSAKERLLLWTQQATEGYAGIRCENFTTCWRDGKLFNAIIHKYRPDLIDMNTVAVQSNLANLEHAFYVAEKIGVIRLLDPEDVDVSSPDEKSVITYVSSLYDAFPKVPEGGEGIGANDVEVKWIEYQNMVNYLIQWIRHHVTTMSERTFPNNPVELKALYNQYLQFKETEIPPKETEKSKIKRLYKLLEIWIEFGRIKLLQGYHPNDIEKEWGKLIIAMLEREKALRPEVERLEMLQQIANRVQRDSVICEDKLILAGNALQSDSKRLESGVQFQNEAEIAGYILECENLLRQHVIDVQILIDGKYYQADQLVQRVAKLRDEIMALRNECSSVYSKGRILTTEQTKLMISGITQSLNSGFAQTLHPSLTSGLTQSLTPSLTSSSMTSGLSSGMTSRLTPSVTPAYTPGFPSGLVPNFSSGVEPNSLQTLKLMQIRKPLLKSSLLDQNLTEEEINMKFVQDLLNWVDEMQVQLDRTEWGSDLPSVESHLENHKNVHRAIEEFESSLKEAKISEIQMTAPLKLTYAEKLHRLESQYAKLLNTSRNQERHLDTLHNFVSRATNELIWLNEKEEEEVAYDWSERNTNIARKKDYHAELMRELDQKEENIKSVQEIAEQLLLENHPARLTIEAYRAAMQTQWSWILQLCQCVEQHIKENTAYFEFFNDAKEATDYLRNLKDAIQRKYSCDRSSSIHKLEDLVQESMEEKEELLQYKSTIANLMGKAKTIIQLKPRNSDCPLKTSIPIKAICDYRQIEITIYKDDECVLANNSHRAKWKVISPTGNEAMVPSVCFTVPPPNKEAVDLANRIEQQYQNVLTLWHESHINMKSVVSWHYLINEIDRIRASNVASIKTMLPGEHQQVLSNLQSRFEDFLEDSQESQVFSGSDITQLEKEVNVCKQYYQELLKSAEREEQEESVYNLYISEVRNIRLRLENCEDRLIRQIRTPLERDDLHESVFRITEQEKLKKELERLKDDLGTITNKCEEFFSQAAASSSVPTLRSELNVVLQNMNQVYSMSSTYIDKLKTVNLVLKNTQAAEALVKLYETKLCEEEAVIADKNNIENLISTLKQWRSEVDEKRQVFHALEDELQKAKAISDEMFKTYKERDLDFDWHKEKADQLVERWQNVHVQIDNRLRDLEGIGKSLKYYRDTYHPLDDWIQQVETTQRKIQENQPENSKTLATQLNQQKMLVSEIEMKQSKMDECQKYAEQYSATVKDYELQTMTYRAMVDSQQKSPVKRRRMQSSADLIIQEFMDLRTRYTALVTLMTQYIKFAGDSLKRLEEEEKSLEEEKKEHVEKAKELQKWVSNISKTLKDAEKAGKPPFSKQKISSEEISTKKEQLSEALQTIQLFLAKHGDKMTDEERNELEKQVKTLQESYNLLFSESLKQLQESQTSGDVKVEEKLDKVIAGTIDQTTGEVLSVFQAVLRGLIDYDTGIRLLETQLMISGLISPELRKCFDLKDAKSHGLIDEQILCQLKELSKAKEIISAASPTTIPVLDALAQSMITESMAIKVLEILLSTGSLVIPATGEQLTLQKAFQQNLVSSALFSKVLERQNMCKDLIDPCTSEKVSLIDMVQRSTLQENTGMWLLPVRPQEGGRITLKCGRNISILRAAHEGLIDRETMFRLLSAQLLSGGLINSNSGQRMTVEEAVREGVIDRDTASSILTYQVQTGGIIQSNPAKRLTVDEAVQCDLITSSSALLVLEAQRGYVGLIWPHSGEIFPTSSSLQQELITNELAYKILNGRQKIAALYIPESSQVIGLDAAKQLGIIDNNTASILKNITLPDKMPDLGDLEACKNARRWLSFCKFQPSTVHDYRQEEDVFDGEEPVTTQTSEETKKLFLSYLMINSYMDANTGQRLLLYDGDLDEAVGMLLEGCHAEFDGNTAIKECLDVLSSSGVFLNNASGREKDECTATPSSFNKCHCGEPEHEETPENRKCAIDEEFNEMRNTVINSEFSQSGKLASTISIDPKVNSSPSVCVPSLISYLTQTELADISMLRSDSENILTNYENQSRVETNERANECSHSKNIQNFPSDLIENPIMKSKMSKFCGVNETENEDNTNRDSPIFDYSPRLSALLSHDKLMHSQGSFNDTHTPESNGNKCEAPALSFSDKTMLSGQRIGEKFQDQFLGIAAINISLPGEQYGQKSLNMISSNPQVQYHNDKYISNTSGEDEKTHPGFQQMPEDKEDESEIEEYSCAVTPGGDTDNAIVSLTCATPLLDETISASDYETSLLNDQQNNTGTDTDSDDDFYDTPLFEDDDHDSLLLDGDDRDCLHPEDYDTLQEENDETASPADVFYDVSKENENSMVPQGAPVGSLSVKNKAHCLQDFLMDVEKDELDSGEKIHLNPVGSDKVNGQSLETGSERECTNILEGDESDSLTDYDIVGGKESFTASLKFDDSGSWRGRKEEYVTGQEFHSDTDHLDSMQSEESYGDYIYDSNDQDDDDDDGIDEEGGGIRDENGKPRCQNVAEDMDIQLCASILNENSDENENINTMILLDKMHSCSSLEKQQRVNVVQLASPSENNLVTEKSNLPEYTTEIAGKSKENLLNHEMVLKDVLPPIIKDTESEKTFGPASISHDNNNISSTSELGTDLANTKVKLIQGSELPELTDSVKGKDEYFKNMTPKVDSSLDHIICTEPDLIGKPAEESHLSLIASVTDKDPQGNGSDLIKGRDGKSDILIEDETSIQKMYLGEGEVLVEGLVEEENRHLKLLPGKNTRDSFKLINSQFPFPQITNNEELNQKGSLKKATVTLKDEPNNLQIIVSKSPVQFENLEEIFDTSVSKEISDDITSDITSWEGNTHFEESFTDGPEKELDLFTYLKHCAKNIKAKDVAKPNEDVPSHVLITAPPMKEHLQLGVNNTKEKSTSTQKDSPLNDMIQSNDLCSKESISGGGTEISQFTPESIEATLSILSRKHVEDVGKNDFLQSERCANGLGNDNSSNTLNTDYSFLEINNKKERIEQQLPKEQALSPRSQEKEVQIPELSQVFVEDVKDILKSRLKEGHMNPQEVEEPSACADTKILIQNLIKRITTSQLVNEASTVPSDSQMSDSSGVSPMTNSSELKPESRDDPFCIGNLKSELLLNILKQDQHSQKITGVFELMRELTHMEYDLEKRGITSKVLPLQLENIFYKLLADGYSEKIEHVGDFNQKACSTSEMMEEKPHILGDIKSKEGNYYSPNLETVKEIGLESSTVWASTLPRDEKLKDLCNDFPSHLECTSGSKEMASGDSSTEQFSSELQQCLQHTEKMHEYLTLLQDMKPPLDNQESLDNNLEALKNQLRQLETFELGLAPIAVILRKDMKLAEEFLKSLPSDFPRGHVEELSISHQSLKTAFSSLSNVSSERTKQIMLAIDSEMSKLAVSHEEFLHKLKSFSDWVSEKSKSVKDIEIVNVQDSEYVKKRLEFLKANNVLKDLGHTKMQLETTAFDVQFFISEYAQDLSPNQSKQLLRLLNTTQKCFLDVQESVTTQVERLETQLHLEQDLDDQKIVAERQQEYKEKLQGICDLLTQTENRLIGHQEAFMIGDGTVELKKYQSKQEELQKDMQGSAQALAEVVKNTENFLKENGEKLSQEDKALIEQKLNEAKIKCEQLNLKAEQSKKELDKVVTTAIKEETEKVAAVKQLEESKTKIENLLDWLSNVDKDSERAGTKHKQVIEQNGTHFQEGDGKSAIGEEDEVNGNLLETDVDGQVGTTQENLNQQYQKVKAQHEKIISQHQAVIIATQSAQVLLEKQGQYLSPEEKEKLQKNMKELKVHYETALAESEKKMKLTHSLQEELEKFDADYTEFEHWLQQSEQELENLEAGADDINGLMTKLKRQKSFSEDVISHKGDLRYITISGNRVLEAAKSCSKRDGGKVDTSATHREVQRKLDHATDRFRSLYSKCNVLGNNLKDLVDKYQHYEDASCGLLAGLQACEATASKHLSEPIAVDPKNLQRQLEETKALQGQISSQQVAVEKLKKTAEVLLDARGSLLPAKNDIQKTLDDIVGRYEDLSKSVNERNEKLQITLTRSLSVQDGLDEMLDWMGNVESSLKEQGQVPLNSTALQDIISKNIMLEQDIAGRQSSINAMNEKVKKFMETTDPSTASSLQAKMKDLSARFSEASHKHKETLAKMEELKTKVELFENLSEKLQTFLETKTQALTEVDVPGKDVTELSQYMQESTSEFLEHKKHLEVLHSLLKEISSHGLPSDKALVLEKTNNLSKKFKEMEDTIKEKKEAVTSCQEQLDAFQVLVKSLKSWIKETTKKVPIVQPSFGAEDLGKSLEDTKKLQEKWSLKTPEIQKVNNSGISLCNLISAVTTPAKAIAAVKSGGAVLNGEGTATNTEEFWANKGLTSIKKDMTDISHGYEDLGLLLKDKIAELNTKLSKLQKAQEESSAMMQWLQKMNKTATKWQQTPAPTDTEAVKTQVEQNKSFEAELKQNVNKVQELKDKLTELLEENPDTPEAPRWKQMLTEIDSKWQELNQLTIDRQQKLEESSNNLTQFQTVEAQLKQWLVEKELMVSVLGPLSIDPNMLNTQRQQVQILLQEFATRKPQYEQLTAAGQGILSRPGEDPSLRGIVKEQLAAVTQKWDSLTGQLSDRCDWIDQAIVKSTQYQSLLRSLSDKLSDLDNKLSSSLAVSTHPDAMNQQLETAQKMKQEIQQEKKQIKVAQALCEDLSALVKEEYLKAELSRQLEGILKSFKDVEQKAENHVQHLQSACASSHQFQQMSRDFQAWLDTKKEEQNKSHPISAKLDVLESLIKDHKDFSKTLTAQSHMYEKTIAEGENLLLKTQGSEKAALQLQLNTIKTNWDTFNKQVKERENKLKESLEKALKYKEQVETLWPWIDKCQNNLEEIKFCLDPAEGENSIAKLKSLQKEMDQHFGMVELLNNTANSLLSVCEIDKEVVTDENKSLIQKVDMVTEQLHSKKFCLENMTQKFKEFQEVSKESKRQLQCAKEQLDIHDSLGSQAYSNKYLTMLQTQQKSLQALKHQVDLAKRLAQDLVVEASDSKGTSDVLLQVETIAQEHSTLSQQVDEKCSFLETKLQGIGHFQNTIREMFSQFAEFDDELDSMAPVGRDAETLQKQKETIKAFLKKLEALMASNDNANKTCKMMLATEETSPDLVGIKRDLEALSKQCNKLLDRAQAREEQVEGTIKRLEEFYSKLKEFSILLQKAEEHEESQGPVGMETETINQQLNMFKVFQKEEIEPLQGKQQDVNWLGQGLIQSAAKSTSTQGLEHDLDDVNARWKTLNKKVAQRAAQLQEALLHCGRFQDALESLLSWMVDTEELVANQKPPSAEFKVVKAQIQEQKLLQRLLDDRKSTVEVIKREGEKIATTAEPADKVKILKQLSLLDSRWEALLNKAETRNRQLEGISVVAQQFHETLEPLNEWLTTIEKRLVNCEPIGTQASKLEEQIAQHKALEDDIINHNKHLHQAVSIGQSLKVLSSREDKDMVQSKLDFSQVWYIEIQEKSHSRSELLQQALCNAKIFGEDEVELMNWLNEVHDKLSKLSVQDYSTEGLWKQQSELRVLQEDILLRKQNVDQALLNGLELLKQTTGDEVLIIQDKLEAIKARYKDITKLSTDVAKTLEQALQLARRLHSTHEELCTWLDKVEVELLSYETQVLKGEEASQAQMRPKELKKEAKNNKALLDSLNEVSSALLELVPWRAREGLEKMVAEDNERYRLVSDTITQKVEEIDAAILRSQQFDQAADAELSWITETEKKLMSLGDIRLEQDQTSAQLQVQKTFTMEILRHKDIIDDLVKSGHKIMTACSEEEKQSMKKKLDKVLKNYDTICQINSERYLQLERAQSLVNQFWETYEELWPWLTETQSIISQLPAPALEYETLRQQQEEHRQLRELIAEHKPHIDKMNKTGPQLLELSPGEGFSIQEKYVAADTLYSQIKEDVKKRAVALDEAISQSTQFHDKIDQILESLERIVERLRQPPSISAEVEKIKEQISENKNVSVDMEKLQPLYETLKQRGEEMIARSGGTDKDISAKAVQDKLDQMVFIWENIHTLVEEREAKLLDVMELAEKFWCDHMSLIVTIKDTQDFIRDLEDPGIDPSVVKQQQEAAETIREEIDGLQEELDIVINLGSELIAACGEPDKPIVKKSIDELNSAWDSLNKAWKDRIDKLEEAMQAAVQYQDGLQAVFDWVDIAGGKLASMSPIGTDLETVKQQIEELKQFKSEAYQQQIEMERLNHQAELLLKKVTEESDKHTVQDPLMELKLIWDSLEERIINRQHKLEGALLALGQFQHALDELLAWLTHTEGLLSEQKPVGGDPKAIEIELAKHHVLQNDVLAHQSTVEAVNKAGNDLIESSAGEEASNLQNKLEVLNQRWQNVLEKTEQRKQQLDGALRQAKGFHGEIEDLQQWLTDTERHLLASKPLGGLPETAKEQLNVHMEVCAAFEAKEETYKSLMQKGQQMLARCPKSAETNIDQDINNLKEKWESVETKLNERKTKLEEALNLAMEFHNSLQDFINWLTQAEQTLNVASRPSLILDTVLFQIDEHKVFANEVNSHREQIIELDKTGTHLKYFSQKQDVVLIKNLLISVQSRWEKVVQRLVERGRSLDDARKRAKQFHEAWSKLMEWLEESEKSLDSELEIANDPDKIKTQLAQHKEFQKSLGAKHSVYDTTNRTGRSLKEKTSLADDNLKLDDMLSELRDKWDTICGKSVERQNKLEEALLFSGQFTDALQALIDWLYRVEPQLAEDQPVHGDIDLVMNLIDNHKAFQKELGKRTSSVQALKRSARELIEGSRDDSSWVKVQMQELSTRWETVCALSISKQTRLEAALRQAEEFHSVVHALLEWLAEAEQTLRFHGVLPDDEDALRTLIDQHKEFMKKLEEKRAELNKATTMGDTVLAICHPDSITTIKHWITIIRARFEEVLAWAKQHQQRLASALAGLIAKQELLEALLAWLQWAETTLTDKDKEVIPQEIEEVKALIAEHQTFMEEMTRKQPDVDKVTKTYKRRAADPSSLQSHIPVLDKGRAGRKRFPASSLYPSGSQTQIETKNPRVNLLVSKWQQVWLLALERRRKLNDALDRLEELREFANFDFDIWRKKYMRWMNHKKSRVMDFFRRIDKDQDGKITRQEFIDGILSSKFPTSRLEMSAVADIFDRDGDGYIDYYEFVAALHPNKDAYKPITDADKIEDEVTRQVAKCKCAKRFQVEQIGDNKYRVSFQSNFGDSQQLRLVRILRSTVMVRVGGGWMALDEFLVKNDPCRVHHHGSKMLRSESNSSITTTQPTIAKGRTNMELREKFILADGASQGMAAFRPRGRRSRPSSRGASPNRSTSVSSQAAQAASPQVPATTTPKGTPIQGSKLRLPGYLSGKGFHSGEDSGLITTAAARVRTQFADSKKTPSRPGSRAGSKAGSRASSRRGSDASDFDISEIQSVCSDVETVPQTHRPTPRAGSRPSTAKPSKIPTPQRKSPASKLDKSSKR

SEQ ID NO: 20110 - protein, 4170 aa, Artificial Sequence
  Synthetic polypeptide
DERDKVQKKTFTKWINQHLMKVRKHVNDLYEDLRDGHNLISLLEVLSGDTLPREKGRMRFHRLQNVQIALDYLKRRQVKLVNIRNDDITDGNPKLTLGLIWTIILHFQISDIHVTGESEDMSAKERLLLWTQQATEGYAGIRCENFTTCWRDGKLFNAIIHKYRPDLIDMNTVAVQSNLANLEHAFYVAEKIGVIRLLDPEDVDVSSPDEKSVITYVSSLYDAFPKVPEGGEGIGANDVEVKWIEYQNMVNYLIQWIRHHVTTMSERTFPNNPVELKALYNQYLQFKETEIPPKETEKSKIKRLYKLLEIWIEFGRIKLLQGYHPNDIEKEWGKLIIAMLEREKALRPEVERLEMLQQIANRVQRDSVICEDKLILAGNALQSDSKRLESGVQFQNEAEIAGYILECENLLRQHVIDVQILIDGKYYQADQLVQRVAKLRDEIMALRNECSSVYSKGRILTTEQTKLMISGITQSLNSGFAQTLHPSLTSGLTQSLTPSLTSSSMTSGLSSGMTSRLTPSVTPAYTPGFPSGLVPNFSSGVEPNSLQTLKLMQIRKPLLKSSLLDQNLTEEEINMKFVQDLLNWVDEMQVQLDRTEWGSDLPSVESHLENHKNVHRAIEEFESSLKEAKISEIQMTAPLKLTYAEKLHRLESQYAKLLNTSRNQERHLDTLHNFVSRATNELIWLNEKEEEEVAYDWSERNTNIARKKDYHAELMRELDQKEENIKSVQEIAEQLLLENHPARLTIEAYRAAMQTQWSWILQLCQCVEQHIKENTAYFEFFNDAKEATDYLRNLKDAIQRKYSCDRSSSIHKLEDLVQESMEEKEELLQYKSTIANLMGKAKTIIQLKPRNSDCPLKTSIPIKAICDYRQIEITIYKDDECVLANNSHRAKWKVISPTGNEAMVPSVCFTVPPPNKEAVDLANRIEQQYQNVLTLWHESHINMKSVVSWHYLINEIDRIRASNVASIKTMLPGEHQQVLSNLQSRFEDFLEDSQESQVFSGSDITQLEKEVNVCKQYYQELLKSAEREEQEESVYNLYISEVRNIRLRLENCEDRLIRQIRTPLERDDLHESVFRITEQEKLKKELERLKDDLGTITNKCEEFFSQAAASSSVPTLRSELNVVLQNMNQVYSMSSTYIDKLKTVNLVLKNTQAAEALVKLYETKLCEEEAVIADKNNIENLISTLKQWRSEVDEKRQVFHALEDELQKAKAISDEMFKTYKERDLDFDWHKEKADQLVERWQNVHVQIDNRLRDLEGIGKSLKYYRDTYHPLDDWIQQVETTQRKIQENQPENSKTLATQLNQQKMLVSEIEMKQSKMDECQKYAEQYSATVKDYELQTMTYRAMVDSQQKSPVKRRRMQSSADLIIQEFMDLRTRYTALVTLMTQYIKFAGDSLKRLEEEEKSLEEEKKEHVEKAKELQKWVSNISKTLKDAEKAGKPPFSKQKISSEEISTKKEQLSEALQTIQLFLAKHGDKMTDEERNELEKQVKTLQESYNLLFSESLKQLQESQTSGDVKVEEKLDKVIAGTIDQTTGEVLSVFQAVLRGLIDYDTGIRLLETQLMISGLISPELRKCFDLKDAKSHGLIDEQILCQLKELSKAKEIISAASPTTIPVLDALAQSMITESMAIKVLEILLSTGSLVIPATGEQLTLQKAFQQNLVSSALFSKVLERQNMCKDLIDPCTSEKVSLIDMVQRSTLQENTGMWLLPVRPQEGGRITLKCGRNISILRAAHEGLIDRETMFRLLSAQLLSGGLINSNSGQRMTVEEAVREGVIDRDTASSILTYQVQTGGIIQSNPAKRLTVDEAVQCDLITSSSALLVLEAQRGYVGLIWPHSGEIFPTSSSLQQELITNELAYKILNGRQKIAALYIPESSQVIGLDAAKQLGIIDNNTASILKNITLPDKMPDLGDLEACKNARRWLSFCKFQPSTVHDYRQEEDVFDGEEPVTTQTSEETKKLFLSYLMINSYMDANTGQRLLLYDGDLDEAVGMLLEGCHAEFDGNTAIKECLDVLSSSGVFLNNASGREKDECTATPSSFNKCHCGEPEHEETPENRKCAIDEEFNEMRNTVINSEFSQSGKLASTISIDPKVNSSPSVCVPSLISYLTQTELADISMLRSDSENILTNYENQSRVETNERANECSHSKNIQNFPSDLIENPIMKSKMSKFCGVNETENEDNTNRDSPIFDYSPRLSALLSHDKLMHSQGSFNDTHTPESNGNKCEAPALSFSDKTMLSGQRIGEKFQDQFLGIAAINISLPGEQYGQKSLNMISSNPQVQYHNDKYISNTSGEDEKTHPGFQQMPEDKEDESEIEEYSCAVTPGGDTDNAIVSLTCATPLLDETISASDYETSLLNDQQNNTGTDTDSDDDFYDTPLFEDDDHDSLLLDGDDRDCLHPEDYDTLQEENDETASPADVFYDVSKENENSMVPQGAPVGSLSVKNKAHCLQDFLMDVEKDELDSGEKIHLNPVGSDKVNGQSLETGSERECTNILEGDESDSLTDYDIVGGKESFTASLKFDDSGSWRGRKEEYVTGQEFHSDTDHLDSMQSEESYGDYIYDSNDQDDDDDDGIDEEGGGIRDENGKPRCQNVAEDMDIQLCASILNENSDENENINTMILLDKMHSCSSLEKQQRVNVVQLASPSENNLVTEKSNLPEYTTEIAGKSKENLLNHEMVLKDVLPPIIKDTESEKTFGPASISHDNNNISSTSELGTDLANTKVKLIQGSELPELTDSVKGKDEYFKNMTPKVDSSLDHIICTEPDLIGKPAEESHLSLIASVTDKDPQGNGSDLIKGRDGKSDILIEDETSIQKMYLGEGEVLVEGLVEEENRHLKLLPGKNTRDSFKLINSQFPFPQITNNEELNQKGSLKKATVTLKDEPNNLQIIVSKSPVQFENLEEIFDTSVSKEISDDITSDITSWEGNTHFEESFTDGPEKELDLFTYLKHCAKNIKAKDVAKPNEDVPSHVLITAPPMKEHLQLGVNNTKEKSTSTQKDSPLNDMIQSNDLCSKESISGGGTEISQFTPESIEATLSILSRKHVEDVGKNDFLQSERCANGLGNDNSSNTLNTDYSFLEINNKKERIEQQLPKEQALSPRSQEKEVQIPELSQVFVEDVKDILKSRLKEGHMNPQEVEEPSACADTKILIQNLIKRITTSQLVNEASTVPSDSQMSDSSGVSPMTNSSELKPESRDDPFCIGNLKSELLLNILKQDQHSQKITGVFELMRELTHMEYDLEKRGITSKVLPLQLENIFYKLLADGYSEKIEHVGDFNQKACSTSEMMEEKPHILGDIKSKEGNYYSPNLETVKEIGLESSTVWASTLPRDEKLKDLCNDFPSHLECTSGSKEMASGDSSTEQFSSELQQCLQHTEKMHEYLTLLQDMKPPLDNQESLDNNLEALKNQLRQLETFELGLAPIAVILRKDMKLAEEFLKSLPSDFPRGHVEELSISHQSLKTAFSSLSNVSSERTKQIMLAIDSEMSKLAVSHEEFLHKLKSFSDWVSEKSKSVKDIEIVNVQDSEYVKKRLEFLKNVLKDLGHTKMQLETTAFDVQFFISEYAQDLSPNQSKQLLRLLNTTQKCFLDVQESVTTQVERLETQLHLEQDLDDQKIVAERQQEYKEKLQGICDLLTQTENRLIGHQEAFMIGDGTVELKKYQSKQEELQKDMQGSAQALAEVVKNTENFLKENGEKLSQEDKALIEQKLNEAKIKCEQLNLKAEQSKKELDKVVTTAIKEETEKVAAVKQLEESKTKIENLLDWLSNVDKDSERAGTKHKQVIEQNGTHFQEGDGKSAIGEEDEVNGNLLETDVDGQVGTTQENLNQQYQKVKAQHEKIISQHQAVIIATQSAQVLLEKQGQYLSPEEKEKLQKNMKELKVHYETALAESEKKMKLTHSLQEELEKFDADYTEFEHWLQQSEQELENLEAGADDINGLMTKLKRQKSFSEDVISHKGDLRYITISGNRVLEAAKSCSKRDGGKVDTSATHREVQRKLDHATDRFRSLYSKCNVLGNNLKDLVDKYQHYEDASCGLLAGLQACEATASKHLSEPIAVDPKNLQRQLEETKALQGQISSQQVAVEKLKKTAEVLLDARGSLLPAKNDIQKTLDDIVGRYEDLSKSVNERNEKLQITLTRSLSVQDGLDEMLDWMGNVESSLKEQDVGTGYCRSSEQYKCHE

SEQ ID NO: 20111 - protein, 7431 aa, Artificial Sequence
  Synthetic polypeptide
DERDKVQKKTFTKWINQHLMKVRKHVNDLYEDLRDGHNLISLLEVLSGDTLPREKGRMRFHRLQNVQIALDYLKRRQVKLVNIRNDDITDGNPKLTLGLIWTIILHFQISDIHVTGESEDMSAKERLLLWTQQATEGYAGIRCENFTTCWRDGKLFNAIIHKYRPDLIDMNTVAVQSNLANLEHAFYVAEKIGVIRLLDPEDVDVSSPDEKSVITYVSSLYDAFPKVPEGGEGIGANDVEVKWIEYQNMVNYLIQWIRHHVTTMSERTFPNNPVELKALYNQYLQFKETEIPPKETEKSKIKRLYKLLEIWIEFGRIKLLQGYHPNDIEKEWGKLIIAMLEREKALRPEVERLEMLQQIANRVQRDSVICEDKLILAGNALQSDSKRLESGVQFQNEAEIAGYILECENLLRQHVIDVQILIDGKYYQADQLVQRVAKLRDEIMALRNECSSVYSKGRILTTEQTKLMISGITQSLNSGFAQTLHPSLTSGLTQSLTPSLTSSSMTSGLSSGMTSRLTPSVTPAYTPGFPSGLVPNFSSGVEPNSLQTLKLMQIRKPLLKSSLLDQNLTEEEINMKFVQDLLNWVDEMQVQLDRTEWGSDLPSVESHLENHKNVHRAIEEFESSLKEAKISEIQMTAPLKLTYAEKLHRLESQYAKLLNTSRNQERHLDTLHNFVSRATNELIWLNEKEEEEVAYDWSERNTNIARKKDYHAELMRELDQKEENIKSVQEIAEQLLLENHPARLTIEAYRAAMQTQWSWILQLCQCVEQHIKENTAYFEFFNDAKEATDYLRNLKDAIQRKYSCDRSSSIHKLEDLVQESMEEKEELLQYKSTIANLMGKAKTIIQLKPRNSDCPLKTSIPIKAICDYRQIEITIYKDDECVLANNSHRAKWKVISPTGNEAMVPSVCFTVPPPNKEAVDLANRIEQQYQNVLTLWHESHINMKSVVSWHYLINEIDRIRASNVASIKTMLPGEHQQVLSNLQSRFEDFLEDSQESQVFSGSDITQLEKEVNVCKQYYQELLKSAEREEQEESVYNLYISEVRNIRLRLENCEDRLIRQIRTPLERDDLHESVFRITEQEKLKKELERLKDDLGTITNKCEEFFSQAAASSSVPTLRSELNVVLQNMNQVYSMSSTYIDKLKTVNLVLKNTQAAEALVKLYETKLCEEEAVIADKNNIENLISTLKQWRSEVDEKRQVFHALEDELQKAKAISDEMFKTYKERDLDFDWHKEKADQLVERWQNVHVQIDNRLRDLEGIGKSLKYYRDTYHPLDDWIQQVETTQRKIQENQPENSKTLATQLNQQKMLVSEIEMKQSKMDECQKYAEQYSATVKDYELQTMTYRAMVDSQQKSPVKRRRMQSSADLIIQEFMDLRTRYTALVTLMTQYIKFAGDSLKRLEEEEKSLEEEKKEHVEKAKELQKWVSNISKTLKDAEKAGKPPFSKQKISSEEISTKKEQLSEALQTIQLFLAKHGDKMTDEERNELEKQVKTLQESYNLLFSESLKQLQESQTSGDVKVEEKLDKVIAGTIDQTTGEVLSVFQAVLRGLIDYDTGIRLLETQLMISGLISPELRKCFDLKDAKSHGLIDEQILCQLKELSKAKEIISAASPTTIPVLDALAQSMITESMAIKVLEILLSTGSLVIPATGEQLTLQKAFQQNLVSSALFSKVLERQNMCKDLIDPCTSEKVSLIDMVQRSTLQENTGMWLLPVRPQEGGRITLKCGRNISILRAAHEGLIDRETMFRLLSAQLLSGGLINSNSGQRMTVEEAVREGVIDRDTASSILTYQVQTGGIIQSNPAKRLTVDEAVQCDLITSSSALLVLEAQRGYVGLIWPHSGEIFPTSSSLQQELITNELAYKILNGRQKIAALYIPESSQVIGLDAAKQLGIIDNNTASILKNITLPDKMPDLGDLEACKNARRWLSFCKFQPSTVHDYRQEEDVFDGEEPVTTQTSEETKKLFLSYLMINSYMDANTGQRLLLYDGDLDEAVGMLLEGCHAEFDGNTAIKECLDVLSSSGVFLNNASGREKDECTATPSSFNKCHCGEPEHEETPENRKCAIDEEFNEMRNTVINSEFSQSGKLASTISIDPKVNSSPSVCVPSLISYLTQTELADISMLRSDSENILTNYENQSRVETNERANECSHSKNIQNFPSDLIENPIMKSKMSKFCGVNETENEDNTNRDSPIFDYSPRLSALLSHDKLMHSQGSFNDTHTPESNGNKCEAPALSFSDKTMLSGQRIGEKFQDQFLGIAAINISLPGEQYGQKSLNMISSNPQVQYHNDKYISNTSGEDEKTHPGFQQMPEDKEDESEIEEYSCAVTPGGDTDNAIVSLTCATPLLDETISASDYETSLLNDQQNNTGTDTDSDDDFYDTPLFEDDDHDSLLLDGDDRDCLHPEDYDTLQEENDETASPADVFYDVSKENENSMVPQGAPVGSLSVKNKAHCLQDFLMDVEKDELDSGEKIHLNPVGSDKVNGQSLETGSERECTNILEGDESDSLTDYDIVGGKESFTASLKFDDSGSWRGRKEEYVTGQEFHSDTDHLDSMQSEESYGDYIYDSNDQDDDDDDGIDEEGGGIRDENGKPRCQNVAEDMDIQLCASILNENSDENENINTMILLDKMHSCSSLEKQQRVNVVQLASPSENNLVTEKSNLPEYTTEIAGKSKENLLNHEMVLKDVLPPIIKDTESEKTFGPASISHDNNNISSTSELGTDLANTKVKLIQGSELPELTDSVKGKDEYFKNMTPKVDSSLDHIICTEPDLIGKPAEESHLSLIASVTDKDPQGNGSDLIKGRDGKSDILIEDETSIQKMYLGEGEVLVEGLVEEENRHLKLLPGKNTRDSFKLINSQFPFPQITNNEELNQKGSLKKATVTLKDEPNNLQIIVSKSPVQFENLEEIFDTSVSKEISDDITSDITSWEGNTHFEESFTDGPEKELDLFTYLKHCAKNIKAKDVAKPNEDVPSHVLITAPPMKEHLQLGVNNTKEKSTSTQKDSPLNDMIQSNDLCSKESISGGGTEISQFTPESIEATLSILSRKHVEDVGKNDFLQSERCANGLGNDNSSNTLNTDYSFLEINNKKERIEQQLPKEQALSPRSQEKEVQIPELSQVFVEDVKDILKSRLKEGHMNPQEVEEPSACADTKILIQNLIKRITTSQLVNEASTVPSDSQMSDSSGVSPMTNSSELKPESRDDPFCIGNLKSELLLNILKQDQHSQKITGVFELMRELTHMEYDLEKRGITSKVLPLQLENIFYKLLADGYSEKIEHVGDFNQKACSTSEMMEEKPHILGDIKSKEGNYYSPNLETVKEIGLESSTVWASTLPRDEKLKDLCNDFPSHLECTSGSKEMASGDSSTEQFSSELQQCLQHTEKMHEYLTLLQDMKPPLDNQESLDNNLEALKNQLRQLETFELGLAPIAVILRKDMKLAEEFLKSLPSDFPRGHVEELSISHQSLKTAFSSLSNVSSERTKQIMLAIDSEMSKLAVSHEEFLHKLKSFSDWVSEKSKSVKDIEIVNVQDSEYVKKRLEFLKNVLKDLGHTKMQLETTAFDVQFFISEYAQDLSPNQSKQLLRLLNTTQKCFLDVQESVTTQVERLETQLHLEQDLDDQKIVAERQQEYKEKLQGICDLLTQTENRLIGHQEAFMIGDGTVELKKYQSKQEELQKDMQGSAQALAEVVKNTENFLKENGEKLSQEDKALIEQKLNEAKIKCEQLNLKAEQSKKELDKVVTTAIKEETEKVAAVKQLEESKTKIENLLDWLSNVDKDSERAGTKHKQVIEQNGTHFQEGDGKSAIGEEDEVNGNLLETDVDGQVGTTQENLNQQYQKVKAQHEKIISQHQAVIIATQSAQVLLEKQGQYLSPEEKEKLQKNMKELKVHYETALAESEKKMKLTHSLQEELEKFDADYTEFEHWLQQSEQELENLEAGADDINGLMTKLKRQKSFSEDVISHKGDLRYITISGNRVLEAAKSCSKRDGGKVDTSATHREVQRKLDHATDRFRSLYSKCNVLGNNLKDLVDKYQHYEDASCGLLAGLQACEATASKHLSEPIAVDPKNLQRQLEETKALQGQISSQQVAVEKLKKTAEVLLDARGSLLPAKNDIQKTLDDIVGRYEDLSKSVNERNEKLQITLTRSLSVQDGLDEMLDWMGNVESSLKEQGQVPLNSTALQDIISKNIMLEQDIAGRQSSINAMNEKVKKFMETTDPSTASSLQAKMKDLSARFSEASHKHKETLAKMEELKTKVELFENLSEKLQTFLETKTQALTEVDVPGKDVTELSQYMQESTSEFLEHKKHLEVLHSLLKEISSHGLPSDKALVLEKTNNLSKKFKEMEDTIKEKKEAVTSCQEQLDAFQVLVKSLKSWIKETTKKVPIVQPSFGAEDLGKSLEDTKKLQEKWSLKTPEIQKVNNSGISLCNLISAVTTPAKAIAAVKSGGAVLNGEGTATNTEEFWANKGLTSIKKDMTDISHGYEDLGLLLKDKIAELNTKLSKLQKAQEESSAMMQWLQKMNKTATKWQQTPAPTDTEAVKTQVEQNKSFEAELKQNVNKVQELKDKLTELLEENPDTPEAPRWKQMLTEIDSKWQELNQLTIDRQQKLEESSNNLTQFQTVEAQLKQWLVEKELMVSVLGPLSIDPNMLNTQRQQVQILLQEFATRKPQYEQLTAAGQGILSRPGEDPSLRGIVKEQLAAVTQKWDSLTGQLSDRCDWIDQAIVKSTQYQSLLRSLSDKLSDLDNKLSSSLAVSTHPDAMNQQLETAQKMKQEIQQEKKQIKVAQALCEDLSALVKEEYLKAELSRQLEGILKSFKDVEQKAENHVQHLQSACASSHQFQQMSRDFQAWLDTKKEEQNKSHPISAKLDVLESLIKDHKDFSKTLTAQSHMYEKTIAEGENLLLKTQGSEKAALQLQLNTIKTNWDTFNKQVKERENKLKESLEKALKYKEQVETLWPWIDKCQNNLEEIKFCLDPAEGENSIAKLKSLQKEMDQHFGMVELLNNTANSLLSVCEIDKEVVTDENKSLIQKVDMVTEQLHSKKFCLENMTQKFKEFQEVSKESKRQLQCAKEQLDIHDSLGSQAYSNKYLTMLQTQQKSLQALKHQVDLAKRLAQDLVVEASDSKGTSDVLLQVETIAQEHSTLSQQVDEKCSFLETKLQGIGHFQNTIREMFSQFAEFDDELDSMAPVGRDAETLQKQKETIKAFLKKLEALMASNDNANKTCKMMLATEETSPDLVGIKRDLEALSKQCNKLLDRAQAREEQVEGTIKRLEEFYSKLKEFSILLQKAEEHEESQGPVGMETETINQQLNMFKVFQKEEIEPLQGKQQDVNWLGQGLIQSAAKSTSTQGLEHDLDDVNARWKTLNKKVAQRAAQLQEALLHCGRFQDALESLLSWMVDTEELVANQKPPSAEFKVVKAQIQEQKLLQRLLDDRKSTVEVIKREGEKIATTAEPADKVKILKQLSLLDSRWEALLNKAETRNRQLEGISVVAQQFHETLEPLNEWLTTIEKRLVNCEPIGTQASKLEEQIAQHKVLQEDILLRKQNVDQALLNGLELLKQTTGDEVLIIQDKLEAIKARYKDITKLSTDVAKTLEQALQLARRLHSTHEELCTWLDKVEVELLSYETQVLKGEEASQAQMRPKELKKEAKNNKALLDSLNEVSSALLELVPWRAREGLEKMVAEDNERYRLVSDTITQKVEEIDAAILRSQQFDQAADAELSWITETEKKLMSLGDIRLEQDQTSAQLQVQKTFTMEILRHKDIIDDLVKSGHKIMTACSEEEKQSMKKKLDKVLKNYDTICQINSERYLQLERAQSLVNQFWETYEELWPWLTETQSIISQLPAPALEYETLRQQQEEHRQLRELIAEHKPHIDKMNKTGPQLLELSPGEGFSIQEKYVAADTLYSQIKEDVKKRAVALDEAISQSTQFHDKIDQILESLERIVERLRQPPSISAEVEKIKEQISENKNVSVDMEKLQPLYETLKQRGEEMIARSGGTDKDISAKAVQDKLDQMVFIWENIHTLVEEREAKLLDVMELAEKFWCDHMSLIVTIKDTQDFIRDLEDPGIDPSVVKQQQEAAETIREEIDGLQEELDIVINLGSELIAACGEPDKPIVKKSIDELNSAWDSLNKAWKDRIDKLEEAMQAAVQYQDGLQAVFDWVDIAGGKLASMSPIGTDLETVKQQIEELKQFKSEAYQQQIEMERLNHQAELLLKKVTEESDKHTVQDPLMELKLIWDSLEERIINRQHKLEGALLALGQFQHALDELLAWLTHTEGLLSEQKPVGGDPKAIEIELAKHHVLQNDVLAHQSTVEAVNKAGNDLIESSAGEEASNLQNKLEVLNQRWQNVLEKTEQRKQQLDGALRQAKGFHGEIEDLQQWLTDTERHLLASKPLGGLPETAKEQLNVHMEVCAAFEAKEETYKSLMQKGQQMLARCPKSAETNIDQDINNLKEKWESVETKLNERKTKLEEALNLAMEFHNSLQDFINWLTQAEQTLNVASRPSLILDTVLFQIDEHKVFANEVNSHREQIIELDKTGTHLKYFSQKQDVVLIKNLLISVQSRWEKVVQRLVERGRSLDDARKRAKQFHEAWSKLMEWLEESEKSLDSELEIANDPDKIKTQLAQHKEFQKSLGAKHSVYDTTNRTGRSLKEKTSLADDNLKLDDMLSELRDKWDTICGKSVERQNKLEEALLFSGQFTDALQALIDWLYRVEPQLAEDQPVHGDIDLVMNLIDNHKAFQKELGKRTSSVQALKRSARELIEGSRDDSSWVKVQMQELSTRWETVCALSISKQTRLEAALRQAEEFHSVVHALLEWLAEAEQTLRFHGVLPDDEDALRTLIDQHKEFMKKLEEKRAELNKATTMGDTVLAICHPDSITTIKHWITIIRARFEEVLAWAKQHQQRLASALAGLIAKQELLEALLAWLQWAETTLTDKDKEVIPQEIEEVKALIAEHQTFMEEMTRKQPDVDKVTKTYKRRAADPSSLQSHIPVLDKGRAGRKRFPASSLYPSGSQTQIETKNPRVNLLVSKWQQVWLLALERRRKLNDALDRLEELREFANFDFDIWRKKYMRWMNHKKSRVMDFFRRIDKDQDGKITRQEFIDGILSSKFPTSRLEMSAVADIFDRDGDGYIDYYEFVAALHPNKDAYKPITDADKIEDEVTRQVAKCKCAKRFQVEQIGDNKYRFFLGNQFGDSQQLRLVRILRSTVMVRVGGGWMALDEFLVKNDPCRVHHHGSKMLRSESNSSITTTQPTIAKGRTNMELREKFILADGASQGMAAFRPRGRRSRPSSRGASPNRSTSVSSQAAQAASPQVPATTTPKGTPIQGSKLRLPGYLSGKGFHSGEDSGLITTAAARVRTQFADSKKTPSRPGSRAGSKAGSRASSRRGSDASDFDISEIQSVCSDVETVPQTHRPTPRAGSRPSTAKPSKIPTPQRKSPASKLDKSSKR

SEQ ID NO: 20112 - protein, 7 aa, Artificial Sequence
  Synthetic polypeptide
FLHFHLR

SEQ ID NO: 20113 - protein, 46 aa, Artificial Sequence
  Synthetic polypeptide
GRSQDGRIGTAPVCISQRERRRRRVISAFPFEMNGTKFRRKHLQNG

SEQ ID NO: 20114 - protein, 9 aa, Artificial Sequence
  Synthetic polypeptide
LWTLVGRVL

SEQ ID NO: 20115 - protein, 734 aa, Artificial Sequence
  Synthetic polypeptide
VRRVNLNHKIGPDCSELTLDVSGQGTLNPYCVLWDDSKTNESLGTWSTQGCKTVLTDASHTKCLCDRLSTFAILAQQPREIIMESSGTPSVTLIVGSGLSCLALITLAVVYAALWRYIRSERSIILINFCLSIISSNILILVGQTQTHNKSICTTTTAFLHFFFLASFCWVLTEAWQSYMAVTGKIRTRLIRKRFLCLGWGLPALVVATSVGFTRTKGYGTDHYCWLSLEGGLLYAFVGPAAAVVLVNMVIGILVFNKLVSRDGILDKKLKHRAGQMSEPHSGLTLKCAKCGVVSTTALSATTASNAMASLWSSCVVLPLLALTWMSAVLAMTDKRSILFQILFAVFDSLQGFVIVMVHCILRREVQDAFRCRLRNCQDPINADSSSSFPNGHAQIMTDFEKDVDIACRSVLHKDIGPCRAATITGTLSRISLNDDEEEKGTNPEGLSYSTLPGNVISKVIIQQPTGLHMPMSMNELSNPCLKKENSELRRTVYLCTDDNLRGADMDIVHPQERMMESDYIVMPRSSVNNQPSMKEESKMNIGMETLPHERLLHYKVNPEFNMNPPVMDQFNMNLEQHLAPQEHMQNLPFEPRTAVKNFMASELDDNAGLSRSETGSTISMSSLERRKSRYSDLDFEKVMHTRKRHMELFQELNQKFQTLDRFRDIPNTSSMENPAPNKNPWDTFKNPSEYPHYTTINVLDTEAKDALELRPAEWEKCLNLPLDVQEGDFQTEV

SEQ ID NO: 20116 - protein, 13 aa, Artificial Sequence
  Synthetic polypeptide
WAGYFESLLCIVG

SEQ ID NO: 20117 - protein, 6 aa, Artificial Sequence
  Synthetic polypeptide
HSIRVL

SEQ ID NO: 20118 - protein, 16 aa, Artificial Sequence
  Synthetic polypeptide
SDIQSGYFESLLCIVG

SEQ ID NO: 20119 - protein, 721 aa, Artificial Sequence
  Synthetic polypeptide
WRREDDLTFNQGTLNPYCVLWDDSKTNESLGTWSTQGCKTVLTDASHTKCLCDRLSTFAILAQQPREIIMESSGTPSVTLIVGSGLSCLALITLAVVYAALWRYIRSERSIILINFCLSIISSNILILVGQTQTHNKSICTTTTAFLHFFFLASFCWVLTEAWQSYMAVTGKIRTRLIRKRFLCLGWGLPALVVATSVGFTRTKGYGTDHYCWLSLEGGLLYAFVGPAAAVVLVNMVIGILVFNKLVSRDGILDKKLKHRAGQMSEPHSGLTLKCAKCGVVSTTALSATTASNAMASLWSSCVVLPLLALTWMSAVLAMTDKRSILFQILFAVFDSLQGFVIVMVHCILRREVQDAFRCRLRNCQDPINADSSSSFPNGHAQIMTDFEKDVDIACRSVLHKDIGPCRAATITGTLSRISLNDDEEEKGTNPEGLSYSTLPGNVISKVIIQQPTGLHMPMSMNELSNPCLKKENSELRRTVYLCTDDNLRGADMDIVHPQERMMESDYIVMPRSSVNNQPSMKEESKMNIGMETLPHERLLHYKVNPEFNMNPPVMDQFNMNLEQHLAPQEHMQNLPFEPRTAVKNFMASELDDNAGLSRSETGSTISMSSLERRKSRYSDLDFEKVMHTRKRHMELFQELNQKFQTLDRFRDIPNTSSMENPAPNKNPWDTFKNPSEYPHYTTINVLDTEAKDALELRPAEWEKCLNLPLDVQEGDFQTEV

SEQ ID NO: 20120 - protein, 14 aa, Artificial Sequence
  Synthetic polypeptide
DQPGQHVHARYGKY

SEQ ID NO: 20121 - protein, 64 aa, Artificial Sequence
  Synthetic polypeptide
GQEFETSPANMCMQDMGNTKARLLYEANLPENFRRPQTDHEDIILETTAVITLLLNKCLPYAKP

SEQ ID NO: 20122 - protein, 394 aa, Artificial Sequence
  Synthetic polypeptide
GQEFETSPANMCMQDMGNTKARLLYEANLPENFRRPQTDQAVEFFIRDKYEKKKYYDKNAIAITNISSSDAPLQPLVSSPSLQAAVDKNKLEKEKEKKKEEKKREKEPEKPAKPLTAEKLQKKDQQLEPKKSTSPKKAAEPTVDLLGLDGPAVAPVTNGNTTVPPLNDDLDIFGPMISNPLPATVMPPAQGTPSAPAAATLSTVTSGDLDLFTEQTTKSEEVAKKQLSKDSILSLYGTGTIQQQSTPGVFMGPTNIPFTSQAPAAFQGFPSMGVPVPAAPGLIGNVMGQSPSMMVGMPMPNGFMGNAQTGVMPLPQNVVGPQGGMVGQMGAPQSKFGLPQAQQPQWSLSQMNQQMAGMSISSATPTAGFGQPSSTTAGWSGSSSGQTLSTQLWK

SEQ ID NO: 20123 - protein, 363 aa, Artificial Sequence
  Synthetic polypeptide
GQEFETSPANMCMQDMGNTKARLLYEANLPENFRRPQTDQAVEFFIRDKYEKKKYYDKNAIAITNKEKEKKKEEKKREKEPEKPAKPLTAEKLQKKDQQLEPKKSTSPKKAAEPTVDLLGLDGPAVAPVTNGNTTVPPLNDDLDIFGPMISNPLPATVMPPAQGTPSAPAAATLSTVTSGDLDLFTEQTTKSEEVAKKQLSKDSILSLYGTGTIQQQSTPGVFMGPTNIPFTSQAPAAFQGFPSMGVPVPAAPGLIGNVMGQSPSMMVGMPMPNGFMGNAQTGVMPLPQNVVGPQGGMVGQMGAPQSKFGLPQAQQPQWSLSQIMQKGDAVLQHSISAIYWPMTRWLKCPLVDESADGWHEYQ

SEQ ID NO: 20124 - protein, 367 aa, Artificial Sequence
  Synthetic polypeptide
GQEFETSPANMCMQDMGNTKARLLYEANLPENFRRPQTDQAVEFFIRDKYEKKKYYDKNAIAITNKEKEKKKEEKKREKEPEKPAKPLTAEKLQKKDQQLEPKKSTSPKKAAEPTVDLLGLDGPAVAPVTNGNTTVPPLNDDLDIFGPMISNPLPATVMPPAQGTPSAPAAATLSTVTSGDLDLFTEQTTKSEEVAKKQLSKDSILSLYGTGTIQQQSTPGVFMGPTNIPFTSQAPAAFQGFPSMGVPVPAAPGLIGNVMGQSPSMMVGMPMPNGFMGNAQTGVMPLPQNVVGPQGGMVGQMGAPQSKFGLPQAQQPQWSLSQMNQQMAGMSISSATPTAGFGQPSSTTAGWSGSSSGQTLSTQLWK

SEQ ID NO: 20125 - protein, 83 aa, Artificial Sequence
  Synthetic polypeptide
GRVRWLIPVIPALWEAQAGRSSEVRSLRPARPTCACKIWEILKQDYSMKPIFQRTFEDHRQIKQWNFSSEINMKRRNTTIKMP

SEQ ID NO: 20126 - protein, 65 aa, Artificial Sequence
  Synthetic polypeptide
GRVRWLIPVIPALWEAQAGRSSEVRSLRPARPTCACKIWEILKQDYSMKPIFQRTFEDHRQIMKI

SEQ ID NO: 20127 - protein, 27 aa, Artificial Sequence
  Synthetic polypeptide
GPERKGKKKGREKERKGARKAGKTTYS

SEQ ID NO: 20128 - protein, 69 aa, Artificial Sequence
  Synthetic polypeptide
HQFIFSFFAARKLRARKKRKKKRKRKREKRSQKSRQNHLQLKSCRRKISNWSLKKVPALKKLRSPLWIF

SEQ ID NO: 20129 - protein, 314 aa, Artificial Sequence
  Synthetic polypeptide
SSVYLFFFCCQETKGQKEKEKKKEEKKREKEPEKPAKPLTAEKLQKKDQQLEPKKSTSPKKAAEPTVDLLGLDGPAVAPVTNGNTTVPPLNDDLDIFGPMISNPLPATVMPPAQGTPSAPAAATLSTVTSGDLDLFTEQTTKSEEVAKKQLSKDSILSLYGTGTIQQQSTPGVFMGPTNIPFTSQAPAAFQGFPSMGVPVPAAPGLIGNVMGQSPSMMVGMPMPNGFMGNAQTGVMPLPQNVVGPQGGMVGQMGAPQSKFGLPQAQQPQWSLSQIMQKGDAVLQHSISAIYWPMTRWLKCPLVDESADGWHEYQ

SEQ ID NO: 20130 - protein, 318 aa, Artificial Sequence
  Synthetic polypeptide
SSVYLFFFCCQETKGQKEKEKKKEEKKREKEPEKPAKPLTAEKLQKKDQQLEPKKSTSPKKAAEPTVDLLGLDGPAVAPVTNGNTTVPPLNDDLDIFGPMISNPLPATVMPPAQGTPSAPAAATLSTVTSGDLDLFTEQTTKSEEVAKKQLSKDSILSLYGTGTIQQQSTPGVFMGPTNIPFTSQAPAAFQGFPSMGVPVPAAPGLIGNVMGQSPSMMVGMPMPNGFMGNAQTGVMPLPQNVVGPQGGMVGQMGAPQSKFGLPQAQQPQWSLSQMNQQMAGMSISSATPTAGFGQPSSTTAGWSGSSSGQTLSTQLWK

SEQ ID NO: 20131 - protein, 101 aa, Artificial Sequence
  Synthetic polypeptide
SSVYLFFFCCQETKGQKEKEKKKEEKKREKEPEKPAKPLTAEKLQKKDQQLEPKKSTSPKKAAEPTVDLLGLVWRKIEKEKSERQLVEVEELTFMYCFPKN

SEQ ID NO: 20132 - protein, 20 aa, Artificial Sequence
  Synthetic polypeptide
AQRNFVRTNVIMAFLAQVLH

SEQ ID NO: 20133 - protein, 108 aa, Artificial Sequence
  Synthetic polypeptide
SFFFNRMEEELLSPEKFCADQCNNGILGSGFALKVQEQHRQKHFEKRRNPAANLIQCVWRSYAADEKSVSIATWKPHLKALHTCSPTKKEQGEASSRFVISLLLHVCL

SEQ ID NO: 20134 - protein, 503 aa, Artificial Sequence
  Synthetic polypeptide
SFFFNRMEEELLSPEKFCADQCNNGILGSGFALKVQEQHRQKHFEKRRNPAANLIQCVWRSYAADEKSVSIATWKPHLKALHTCSPTKKEQGEASSRIMKFHVAKRKFKETLRPYDVKDVIEQYSAGHLDMLCRIKSLQTRVDQILGKGQITSDKKSREKITAEHETTDDLSMLGRVVKVEKQVQSIESKLDCLLDIYQQVLRKGSASALALASFQIPPFECEQTSDYQSPVDSKDLSGSAQNSGCLSRSTSANISRGLQFILTPNEFSAQTFYALSPTMHSQATQVPISQSDGSAVAATNTIANQINTAPKPAAPTTLQIPPPLPAIKHLPRPETLHPNPAGLQESISDVTTCLVASKENVQVAQSNLTKDRSMRKSFDMGGETLLSVCPMVPKDLGKSLSVQNLIRSTEELNIQLSGSESSGSRGSQDFYPKWRESKLFITDEEVGPEETETDTFDAAPQPAREAAFASDSLRTGRSRSSQSICKAGESTDALSLPHVKLK

SEQ ID NO: 20135 - protein, 632 aa, Artificial Sequence
  Synthetic polypeptide
SFFFNRMEEELLSPEKFCADQCNNGILGSGFALKVQEQHRQKHFEKRRNPAANLIQCVWRSYAADEKSVSIATWKPHLKALHTCSPTKKEQGEASSSKFCSNKQKLFRMYTSRKQSQKLSFKERVRMASPRGQSIKSRQASVGDRRSPSTDITAEGSPTKVQKSWSFNDRTRFRPSLRLKSSQPKPVIDADTALGTDDVYDEKGCQCDVSVEDLTPPLKTVIRAIRIMKFHVAKRKFKETLRPYDVKDVIEQYSAGHLDMLCRIKSLQTRVDQILGKGQITSDKKSREKITAEHETTDDLSMLGRVVKVEKQVQSIESKLDCLLDIYQQVLRKGSASALALASFQIPPFECEQTSDYQSPVDSKDLSGSAQNSGCLSRSTSANISRGLQFILTPNEFSAQTFYALSPTMHSQATQVPISQSDGSAVAATNTIANQINTAPKPAAPTTLQIPPPLPAIKHLPRPETLHPNPAGLQESISDVTTCLVASKENVQVAQSNLTKDRSMRKSFDMGGETLLSVCPMVPKDLGKSLSVQNLIRSTEELNIQLSGSESSGSRGSQDFYPKWRESKLFITDEEVGPEETETDTFDAAPQPAREAAFASDSLRTGRSRSSQSICKAGESTDALSLPHVKLK

SEQ ID NO: 20136 - protein, 613 aa, Artificial Sequence
  Synthetic polypeptide
SFFFNRMEEELLSPEKFCADQCNNGILGSGFALKVQEQHRQKHFEKRRNPAANLIQCVWRSYAADEKSVSIATWKPHLKALHTCSPTKKEQGEASSSQKLSFKERVRMASPRGQSIKSRQASVGDRRSPSTDITAEGSPTKVQKSWSFNDRTRFRPSLRLKSSQPKPVIDADTALGTDDVYDEKGCQCDVSVEDLTPPLKTVIRAIRIMKFHVAKRKFKETLRPYDVKDVIEQYSAGHLDMLCRIKSLQTRVDQILGKGQITSDKKSREKITAEHETTDDLSMLGRVVKVEKQVQSIESKLDCLLDIYQQVLRKGSASALALASFQIPPFECEQTSDYQSPVDSKDLSGSAQNSGCLSRSTSANISRGLQFILTPNEFSAQTFYALSPTMHSQATQVPISQSDGSAVAATNTIANQINTAPKPAAPTTLQIPPPLPAIKHLPRPETLHPNPAGLQESISDVTTCLVASKENVQVAQSNLTKDRSMRKSFDMGGETLLSVCPMVPKDLGKSLSVQNLIRSTEELNIQLSGSESSGSRGSQDFYPKWRESKLFITDEEVGPEETETDTFDAAPQPAREAAFASDSLRTGRSRSSQSICKAGESTDALSLPHVKLK

SEQ ID NO: 20137 - protein, 614 aa, Artificial Sequence
  Synthetic polypeptide
SFFFNRMEEELLSPEKFCADQCNNGILGSGFALKVQEQHRQKHFEKRRNPAANLIQCVWRSYAADEKSVSIATWKPHLKALHTCSPTKQNQQGESQSCQKLSFKERVRMASPRGQSIKSRQASVGDRRSPSTDITAEGSPTKVQKSWSFNDRTRFRPSLRLKSSQPKPVIDADTALGTDDVYDEKGCQCDVSVEDLTPPLKTVIRAIRIMKFHVAKRKFKETLRPYDVKDVIEQYSAGHLDMLCRIKSLQTRVDQILGKGQITSDKKSREKITAEHETTDDLSMLGRVVKVEKQVQSIESKLDCLLDIYQQVLRKGSASALALASFQIPPFECEQTSDYQSPVDSKDLSGSAQNSGCLSRSTSANISRGLQFILTPNEFSAQTFYALSPTMHSQATQVPISQSDGSAVAATNTIANQINTAPKPAAPTTLQIPPPLPAIKHLPRPETLHPNPAGLQESISDVTTCLVASKENVQVAQSNLTKDRSMRKSFDMGGETLLSVCPMVPKDLGKSLSVQNLIRSTEELNIQLSGSESSGSRGSQDFYPKWRESKLFITDEEVGPEETETDTFDAAPQPAREAAFASDSLRTGRSRSSQSICKAGESTDALSLPHVKLK

SEQ ID NO: 20138 - protein, 623 aa, Artificial Sequence
  Synthetic polypeptide
SFFFNRMEEELLSPEKFCADQCNNGILGSGFALKVQEQHRQKHFEKRRNPAANLIQCVWRSYAADEKSVSIATWKPHLKALHTCSPTNKFCSNKQKLFRMYTSRKQSQKLSFKERVRMASPRGQSIKSRQASVGDRRSPSTDITAEGSPTKVQKSWSFNDRTRFRPSLRLKSSQPKPVIDADTALGTDDVYDEKGCQCDVSVEDLTPPLKTVIRAIRIMKFHVAKRKFKETLRPYDVKDVIEQYSAGHLDMLCRIKSLQTRVDQILGKGQITSDKKSREKITAEHETTDDLSMLGRVVKVEKQVQSIESKLDCLLDIYQQVLRKGSASALALASFQIPPFECEQTSDYQSPVDSKDLSGSAQNSGCLSRSTSANISRGLQFILTPNEFSAQTFYALSPTMHSQATQVPISQSDGSAVAATNTIANQINTAPKPAAPTTLQIPPPLPAIKHLPRPETLHPNPAGLQESISDVTTCLVASKENVQVAQSNLTKDRSMRKSFDMGGETLLSVCPMVPKDLGKSLSVQNLIRSTEELNIQLSGSESSGSRGSQDFYPKWRESKLFITDEEVGPEETETDTFDAAPQPAREAAFASDSLRTGRSRSSQSICKAGESTDALSLPHVKLK

SEQ ID NO: 20139 - protein, 604 aa, Artificial Sequence
  Synthetic polypeptide
SFFFNRMEEELLSPEKFCADQCNNGILGSGFALKVQEQHRQKHFEKRRNPAANLIQCVWRSYAADEKSVSIATWKPHLKALHTCSPTNQKLSFKERVRMASPRGQSIKSRQASVGDRRSPSTDITAEGSPTKVQKSWSFNDRTRFRPSLRLKSSQPKPVIDADTALGTDDVYDEKGCQCDVSVEDLTPPLKTVIRAIRIMKFHVAKRKFKETLRPYDVKDVIEQYSAGHLDMLCRIKSLQTRVDQILGKGQITSDKKSREKITAEHETTDDLSMLGRVVKVEKQVQSIESKLDCLLDIYQQVLRKGSASALALASFQIPPFECEQTSDYQSPVDSKDLSGSAQNSGCLSRSTSANISRGLQFILTPNEFSAQTFYALSPTMHSQATQVPISQSDGSAVAATNTIANQINTAPKPAAPTTLQIPPPLPAIKHLPRPETLHPNPAGLQESISDVTTCLVASKENVQVAQSNLTKDRSMRKSFDMGGETLLSVCPMVPKDLGKSLSVQNLIRSTEELNIQLSGSESSGSRGSQDFYPKWRESKLFITDEEVGPEETETDTFDAAPQPAREAAFASDSLRTGRSRSSQSICKAGESTDALSLPHVKLK

SEQ ID NO: 20140 - protein, 20 aa, Artificial Sequence
  Synthetic polypeptide
WHSWLRFCIKSTRTTPPETL

SEQ ID NO: 20141 - protein, 37 aa, Artificial Sequence
  Synthetic polypeptide
FTPVIPALWEAEAVGSQGHSWLRFCIKSTRTTPPETL

SEQ ID NO: 20142 - protein, 30 aa, Artificial Sequence
  Synthetic polypeptide
MGVVIHACNPSTLGGRGGRITRAFLAQVLH

SEQ ID NO: 20143 - protein, 97 aa, Artificial Sequence
  Synthetic polypeptide
SQHFGRPRRSDHKGILGSGFALKVQEQHRQKHFEKRRNPAANLIQCVWRSYAADEKSVSIATWKPHLKALHTCSPTKKEQGEASSRFVISLLLHVCL

SEQ ID NO: 20144 - protein, 492 aa, Artificial Sequence
  Synthetic polypeptide
SQHFGRPRRSDHKGILGSGFALKVQEQHRQKHFEKRRNPAANLIQCVWRSYAADEKSVSIATWKPHLKALHTCSPTKKEQGEASSRIMKFHVAKRKFKETLRPYDVKDVIEQYSAGHLDMLCRIKSLQTRVDQILGKGQITSDKKSREKITAEHETTDDLSMLGRVVKVEKQVQSIESKLDCLLDIYQQVLRKGSASALALASFQIPPFECEQTSDYQSPVDSKDLSGSAQNSGCLSRSTSANISRGLQFILTPNEFSAQTFYALSPTMHSQATQVPISQSDGSAVAATNTIANQINTAPKPAAPTTLQIPPPLPAIKHLPRPETLHPNPAGLQESISDVTTCLVASKENVQVAQSNLTKDRSMRKSFDMGGETLLSVCPMVPKDLGKSLSVQNLIRSTEELNIQLSGSESSGSRGSQDFYPKWRESKLFITDEEVGPEETETDTFDAAPQPAREAAFASDSLRTGRSRSSQSICKAGESTDALSLPHVKLK

SEQ ID NO: 20145 - protein, 621 aa, Artificial Sequence
  Synthetic polypeptide
SQHFGRPRRSDHKGILGSGFALKVQEQHRQKHFEKRRNPAANLIQCVWRSYAADEKSVSIATWKPHLKALHTCSPTKKEQGEASSSKFCSNKQKLFRMYTSRKQSQKLSFKERVRMASPRGQSIKSRQASVGDRRSPSTDITAEGSPTKVQKSWSFNDRTRFRPSLRLKSSQPKPVIDADTALGTDDVYDEKGCQCDVSVEDLTPPLKTVIRAIRIMKFHVAKRKFKETLRPYDVKDVIEQYSAGHLDMLCRIKSLQTRVDQILGKGQITSDKKSREKITAEHETTDDLSMLGRVVKVEKQVQSIESKLDCLLDIYQQVLRKGSASALALASFQIPPFECEQTSDYQSPVDSKDLSGSAQNSGCLSRSTSANISRGLQFILTPNEFSAQTFYALSPTMHSQATQVPISQSDGSAVAATNTIANQINTAPKPAAPTTLQIPPPLPAIKHLPRPETLHPNPAGLQESISDVTTCLVASKENVQVAQSNLTKDRSMRKSFDMGGETLLSVCPMVPKDLGKSLSVQNLIRSTEELNIQLSGSESSGSRGSQDFYPKWRESKLFITDEEVGPEETETDTFDAAPQPAREAAFASDSLRTGRSRSSQSICKAGESTDALSLPHVKLK

SEQ ID NO: 20146 - protein, 602 aa, Artificial Sequence
  Synthetic polypeptide
SQHFGRPRRSDHKGILGSGFALKVQEQHRQKHFEKRRNPAANLIQCVWRSYAADEKSVSIATWKPHLKALHTCSPTKKEQGEASSSQKLSFKERVRMASPRGQSIKSRQASVGDRRSPSTDITAEGSPTKVQKSWSFNDRTRFRPSLRLKSSQPKPVIDADTALGTDDVYDEKGCQCDVSVEDLTPPLKTVIRAIRIMKFHVAKRKFKETLRPYDVKDVIEQYSAGHLDMLCRIKSLQTRVDQILGKGQITSDKKSREKITAEHETTDDLSMLGRVVKVEKQVQSIESKLDCLLDIYQQVLRKGSASALALASFQIPPFECEQTSDYQSPVDSKDLSGSAQNSGCLSRSTSANISRGLQFILTPNEFSAQTFYALSPTMHSQATQVPISQSDGSAVAATNTIANQINTAPKPAAPTTLQIPPPLPAIKHLPRPETLHPNPAGLQESISDVTTCLVASKENVQVAQSNLTKDRSMRKSFDMGGETLLSVCPMVPKDLGKSLSVQNLIRSTEELNIQLSGSESSGSRGSQDFYPKWRESKLFITDEEVGPEETETDTFDAAPQPAREAAFASDSLRTGRSRSSQSICKAGESTDALSLPHVKLK

SEQ ID NO: 20147 - protein, 603 aa, Artificial Sequence
  Synthetic polypeptide
SQHFGRPRRSDHKGILGSGFALKVQEQHRQKHFEKRRNPAANLIQCVWRSYAADEKSVSIATWKPHLKALHTCSPTKQNQQGESQSCQKLSFKERVRMASPRGQSIKSRQASVGDRRSPSTDITAEGSPTKVQKSWSFNDRTRFRPSLRLKSSQPKPVIDADTALGTDDVYDEKGCQCDVSVEDLTPPLKTVIRAIRIMKFHVAKRKFKETLRPYDVKDVIEQYSAGHLDMLCRIKSLQTRVDQILGKGQITSDKKSREKITAEHETTDDLSMLGRVVKVEKQVQSIESKLDCLLDIYQQVLRKGSASALALASFQIPPFECEQTSDYQSPVDSKDLSGSAQNSGCLSRSTSANISRGLQFILTPNEFSAQTFYALSPTMHSQATQVPISQSDGSAVAATNTIANQINTAPKPAAPTTLQIPPPLPAIKHLPRPETLHPNPAGLQESISDVTTCLVASKENVQVAQSNLTKDRSMRKSFDMGGETLLSVCPMVPKDLGKSLSVQNLIRSTEELNIQLSGSESSGSRGSQDFYPKWRESKLFITDEEVGPEETETDTFDAAPQPAREAAFASDSLRTGRSRSSQSICKAGESTDALSLPHVKLK

SEQ ID NO: 20148 - protein, 612 aa, Artificial Sequence
  Synthetic polypeptide
SQHFGRPRRSDHKGILGSGFALKVQEQHRQKHFEKRRNPAANLIQCVWRSYAADEKSVSIATWKPHLKALHTCSPTNKFCSNKQKLFRMYTSRKQSQKLSFKERVRMASPRGQSIKSRQASVGDRRSPSTDITAEGSPTKVQKSWSFNDRTRFRPSLRLKSSQPKPVIDADTALGTDDVYDEKGCQCDVSVEDLTPPLKTVIRAIRIMKFHVAKRKFKETLRPYDVKDVIEQYSAGHLDMLCRIKSLQTRVDQILGKGQITSDKKSREKITAEHETTDDLSMLGRVVKVEKQVQSIESKLDCLLDIYQQVLRKGSASALALASFQIPPFECEQTSDYQSPVDSKDLSGSAQNSGCLSRSTSANISRGLQFILTPNEFSAQTFYALSPTMHSQATQVPISQSDGSAVAATNTIANQINTAPKPAAPTTLQIPPPLPAIKHLPRPETLHPNPAGLQESISDVTTCLVASKENVQVAQSNLTKDRSMRKSFDMGGETLLSVCPMVPKDLGKSLSVQNLIRSTEELNIQLSGSESSGSRGSQDFYPKWRESKLFITDEEVGPEETETDTFDAAPQPAREAAFASDSLRTGRSRSSQSICKAGESTDALSLPHVKLK

SEQ ID NO: 20149 - protein, 593 aa, Artificial Sequence
  Synthetic polypeptide
SQHFGRPRRSDHKGILGSGFALKVQEQHRQKHFEKRRNPAANLIQCVWRSYAADEKSVSIATWKPHLKALHTCSPTNQKLSFKERVRMASPRGQSIKSRQASVGDRRSPSTDITAEGSPTKVQKSWSFNDRTRFRPSLRLKSSQPKPVIDADTALGTDDVYDEKGCQCDVSVEDLTPPLKTVIRAIRIMKFHVAKRKFKETLRPYDVKDVIEQYSAGHLDMLCRIKSLQTRVDQILGKGQITSDKKSREKITAEHETTDDLSMLGRVVKVEKQVQSIESKLDCLLDIYQQVLRKGSASALALASFQIPPFECEQTSDYQSPVDSKDLSGSAQNSGCLSRSTSANISRGLQFILTPNEFSAQTFYALSPTMHSQATQVPISQSDGSAVAATNTIANQINTAPKPAAPTTLQIPPPLPAIKHLPRPETLHPNPAGLQESISDVTTCLVASKENVQVAQSNLTKDRSMRKSFDMGGETLLSVCPMVPKDLGKSLSVQNLIRSTEELNIQLSGSESSGSRGSQDFYPKWRESKLFITDEEVGPEETETDTFDAAPQPAREAAFASDSLRTGRSRSSQSICKAGESTDALSLPHVKLK

SEQ ID NO: 20150 - protein, 108 aa, Artificial Sequence
  Synthetic polypeptide
PGVVAHACNPSTLEGQGEWITRSRDRDHPGQHEETWRLSFSHIEKEILNNHGKSKTCCENKEEKCCRKDCLKLMKYLLEQLKERFKDKKHLDKFSSYHVKTAFFHRLY

SEQ ID NO: 20151 - protein, 183 aa, Artificial Sequence
  Synthetic polypeptide
PGVVAHACNPSTLEGQGEWITRSRDRDHPGQHEETWRLSFSHIEKEILNNHGKSKTCCENKEEKCCRKDCLKLMKYLLEQLKERFKDKKHLDKFSSYHVKTAFFHVCTQNPQDSQWDRKDLGLCFDNCVTYFLQCLRTEKLENYFIPEFNLFSSNLIDKRSKEFLTKQIEYERNNEFPVFDEF

SEQ ID NO: 20152 - protein, 47 aa, Artificial Sequence
  Synthetic polypeptide
QAWWLTPVIPALWKAKVSGLRGQEIETILANMKKHGGYPSLTSKRKF

SEQ ID NO: 20153 - protein, 92 aa, Artificial Sequence
  Synthetic polypeptide
PGVVAHACNPSTLEGQEETWRLSFSHIEKEILNNHGKSKTCCENKEEKCCRKDCLKLMKYLLEQLKERFKDKKHLDKFSSYHVKTAFFHRLY

SEQ ID NO: 20154 - protein, 167 aa, Artificial Sequence
  Synthetic polypeptide
PGVVAHACNPSTLEGQEETWRLSFSHIEKEILNNHGKSKTCCENKEEKCCRKDCLKLMKYLLEQLKERFKDKKHLDKFSSYHVKTAFFHVCTQNPQDSQWDRKDLGLCFDNCVTYFLQCLRTEKLENYFIPEFNLFSSNLIDKRSKEFLTKQIEYERNNEFPVFDEF

SEQ ID NO: 20155 - protein, 31 aa, Artificial Sequence
  Synthetic polypeptide
QAWWLTPVIPALWKAKKKHGGYPSLTSKRKF

SEQ ID NO: 20156 - protein, 29 aa, Artificial Sequence
  Synthetic polypeptide
SQHFGRPRRNMAAILLSHRKGNFEQSWKI

SEQ ID NO: 20157 - protein, 35 aa, Artificial Sequence
  Synthetic polypeptide
FQHFRRLRKESCFRRNMAAILLSHRKGNFEQSWKI

SEQ ID NO: 20158 - protein, 82 aa, Artificial Sequence
  Synthetic polypeptide
GRRVALEETWRLSFSHIEKEILNNHGKSKTCCENKEEKCCRKDCLKLMKYLLEQLKERFKDKKHLDKFSSYHVKTAFFHRLY

SEQ ID NO: 20159 - protein, 157 aa, Artificial Sequence
  Synthetic polypeptide
GRRVALEETWRLSFSHIEKEILNNHGKSKTCCENKEEKCCRKDCLKLMKYLLEQLKERFKDKKHLDKFSSYHVKTAFFHVCTQNPQDSQWDRKDLGLCFDNCVTYFLQCLRTEKLENYFIPEFNLFSSNLIDKRSKEFLTKQIEYERNNEFPVFDEF

SEQ ID NO: 20160 - protein, 66 aa, Artificial Sequence
  Synthetic polypeptide
AYLKEAAEMGKGSFKYAWVLDKLKAERERGITIDISLWKFETSKYYVTIIDAPGHRDFIKNMITGT

SEQ ID NO: 20161 - protein, 105 aa, Artificial Sequence
  Synthetic polypeptide
AYLKEAAEMGKGSFKYAWVLDKLKAERERGITIDISLWKFETSKYYVTIIDAPGHRDFIKNMITGTSQADCAVLIVAAGVGEFEAGISKNGQTREHALLAYTLGV

SEQ ID NO: 20162 - protein, 422 aa, Artificial Sequence
  Synthetic polypeptide
AYLKEAAEMGKGSFKYAWVLDKLKAERERGITIDISLWKFETSKYYVTIIDAPGHRDFIKNMITGTSQADCAVLIVAAGVGEFEAGISKNGQTREHALLAYTLGVKQLIVGVNKMDSTEPPYSQKRYEEIVKEVSTYIKKIGYNPDTVAFVPISGWNGDNMLEPSANMPWFKGWKVTRKDGNASGTTLLEALDCILPPTRPTDKPLRLPLQDVYKIGGIGTVPVGRVETGVLKPGMVVTFAPVNVTTEVKSVEMHHEALSEALPGDNVGFNVKNVSVKDVRRGNVAGDSKNDPPMEAAGFTAQVIILNHPGQISAGYAPVLDCHTAHIACKFAELKEKIDRRSGKKLEDGPKFLKSGDAAIVDMVPGKPMCVESFSDYPPLGRFAVRDMRQTVAVGVIKAVDKKAAGAGKVTKSAQKAQKAK

SEQ ID NO: 20163 - protein, 13 aa, Artificial Sequence
  Synthetic polypeptide
MLKSTLGILEGGC

SEQ ID NO: 20164 - protein, 48 aa, Artificial Sequence
  Synthetic polypeptide
GLVWWLMPVIPALREAEAGGSRGQEIETILANMKKHGGYPSLTSKRKF

SEQ ID NO: 20165 - protein, 108 aa, Artificial Sequence
  Synthetic polypeptide
PGVVAYACNPSTSGGRGGWITRSRDRDHPGQHEETWRLSFSHIEKEILNNHGKSKTCCENKEEKCCRKDCLKLMKYLLEQLKERFKDKKHLDKFSSYHVKTAFFHRLY

SEQ ID NO: 20166 - protein, 183 aa, Artificial Sequence
  Synthetic polypeptide
PGVVAYACNPSTSGGRGGWITRSRDRDHPGQHEETWRLSFSHIEKEILNNHGKSKTCCENKEEKCCRKDCLKLMKYLLEQLKERFKDKKHLDKFSSYHVKTAFFHVCTQNPQDSQWDRKDLGLCFDNCVTYFLQCLRTEKLENYFIPEFNLFSSNLIDKRSKEFLTKQIEYERNNEFPVFDEF

SEQ ID NO: 20167 - protein, 48 aa, Artificial Sequence
  Synthetic polypeptide
GRAWWLTPVIPALWEAKAGGSQGQEIETILANMKKHGGYPSLTSKRKF

SEQ ID NO: 20168 - protein, 108 aa, Artificial Sequence
  Synthetic polypeptide
PGVVAHACNPSTLGGQGGRITRSRDRDHPGQHEETWRLSFSHIEKEILNNHGKSKTCCENKEEKCCRKDCLKLMKYLLEQLKERFKDKKHLDKFSSYHVKTAFFHRLY

SEQ ID NO: 20169 - protein, 183 aa, Artificial Sequence
  Synthetic polypeptide
PGVVAHACNPSTLGGQGGRITRSRDRDHPGQHEETWRLSFSHIEKEILNNHGKSKTCCENKEEKCCRKDCLKLMKYLLEQLKERFKDKKHLDKFSSYHVKTAFFHVCTQNPQDSQWDRKDLGLCFDNCVTYFLQCLRTEKLENYFIPEFNLFSSNLIDKRSKEFLTKQIEYERNNEFPVFDEF

SEQ ID NO: 20170 - protein, 16 aa, Artificial Sequence
  Synthetic polypeptide
IMSFAATWMQLKGDRL

SEQ ID NO: 20171 - protein, 87 aa, Artificial Sequence
  Synthetic polypeptide
NVVDVHHGILYSHKKELNYVFCSNMDAAEGRQAVRSYNSEVKLSSCDLCSDVQGCRPCEDGASGSHHHSSVIFIFCFKLLYFMELWL

SEQ ID NO: 20172 - protein, 10 aa, Artificial Sequence
  Synthetic polypeptide
RETGCEKLQL

SEQ ID NO: 20173 - protein, 1225 aa, Artificial Sequence
  Synthetic polypeptide
AQEFETSLGDITFLALINQVFPAEEDSKKDVEDNCSLMYLNEATLLHNIKVRYSKDRIYTYVANILIAVNPYFDIPKIYSSEAIKSYQGKSLGTRPPHVFAIADKAFRDMKVLKMSQSIIVSGESGAGKTENTKFVLRYLTESYGTGQDIDDRIVEANPLLEAFGNAKTVRNNNSSRFGKFVEIHFNEKSSVVGGFVSHYLLEKSRICVQGKEERNYHIFYRLCAGASEDIREKLHLSSPDNFRYLNRGCTRYFANKETDKQILQNRKSPEYLKAGSMKDPLLDDHGDFIRMCTAMKKIGLDDEEKLDLFRVVAGVLHLGNIDFEEAGSTSGGCNLKNKSAQSLEYCAELLGLDQDDLRVSLTTRVMLTTAGGTKGTVIKVPLKVEQANNARDALAKTVYSHLFDHVVNRVNQCFPFETSSYFIGVLDIAGFEYFEHNSFEQFCINYCNEKLQQFFNERILKEEQELYQKEGLGVNEVHYVDNQDCIDLIEAKLVGILDILDEENRLPQPSDQHFTSAVHQKHKDHFRLTIPRKSKLAVHRNIRDDEGFIIRHFAGAVCYETTQFVEKNNDALHMSLESLICESRDKFIRELFESSTNNNKDTKQKAGKLSFISVGNKFKTQLNLLLDKLRSTGASFIRCIKPNLKMTSHHFEGAQILSQLQCSGMVSVLDLMQGGYPSRASFHELYNMYKKYMPDKLARLDPRLFCKALFKALGLNENDYKFGLTKVFFRPGKFAEFDQIMKSDPDHLAELVKRVNHWLTCSRWKKVQWCSLSVIKLKNKIKYRAEACIKMQKTIRMWLCKRRHKPRIDGLVKVGTLKKRLDKFNEVVSVLKDGKPEMNKQIKNLEISIDTLMAKIKSTMMTQEQIQKEYDALVKSSEELLSALQKKKQQEEEAERLRRIQEEMEKERKRREEDEKRRRKEEEERRMKLEMEAKRKQEEEERKKREDDEKRIQAEVEAQLARQKEEESQQQAVLEQERRDRELALRIAQSEAELISDEAQADLALRRGPAVLATKAAAGTKKYDLSKWKYAELRDTINTSCDIELLAACREEFHRRLKVYHAWKSKNKKRNTETEQRAPKSVTDYAQQNPAAQIPARQREIEMNRQQRFFRIPFIRPADQYKDPQSKKKGWWYAHFDGPWIARQMELHPDKPPILLVAGKDDMEMCELNLEETGLTRKRGAEILPRQFEEIWERCGGIQYLQNAIESRQARPTYATAMLQSLLK

SEQ ID NO: 20174 - protein, 1234 aa, Artificial Sequence
  Synthetic polypeptide
AQEFETSLGDITFLALINQVFPAEEDSKKDVEDNCSLMYLNEATLLHNIKVRYSKDRIYTYVANILIAVNPYFDIPKIYSSEAIKSYQGKSLGTRPPHVFAIADKAFRDMKVLKMSQSIIVSGESGAGKTENTKFVLRYLTESYGTGQDIDDRIVEANPLLEAFGNAKTVRNNNSSRFGKFVEIHFNEKSSVVGGFVSHYLLEKSRICVQGKEERNYHIFYRLCAGASEDIREKLHLSSPDNFRYLNRGCTRYFANKETDKQILQNRKSPEYLKAGSMKDPLLDDHGDFIRMCTAMKKIGLDDEEKLDLFRVVAGVLHLGNIDFEEAGSTSGGCNLKNKSAQSLEYCAELLGLDQDDLRVSLTTRVMLTTAGGTKGTVIKVPLKVEQANNARDALAKTVYSHLFDHVVNRVNQCFPFETSSYFIGVLDIAGFEYFEHNSFEQFCINYCNEKLQQFFNERILKEEQELYQKEGLGVNEVHYVDNQDCIDLIEAKLVGILDILDEENRLPQPSDQHFTSAVHQKHKDHFRLTIPRKSKLAVHRNIRDDEGFIIRHFAGAVCYETTQFVEKNNDALHMSLESLICESRDKFIRELFESSTNNNKDTKQKAGKLSFISVGNKFKTQLNLLLDKLRSTGASFIRCIKPNLKMTSHHFEGAQILSQLQCSGMVSVLDLMQGGYPSRASFHELYNMYKKYMPDKLARLDPRLFCKALFKALGLNENDYKFGLTKVFFRPGKFAEFDQIMKSDPDHLAELVKRVNHWLTCSRWKKVQWCSLSVIKLKNKIKYRAEACIKMQKTIRMWLCKRRHKPRIDGLVKVGTLKKRLDKFNEVVSVLKDGKPEMNKQIKNLEISIDTLMAKIKSTMMTQEQIQKEYDALVKSSEELLSALQKKKQQEEEAERLRRIQEEMEKERKRREEDEKRRRKEEEERRMKLEMEAKRKQEEEERKKREDDEKRIQAEVEAQLARQKEEESQQQAVLEQERRDRELALRIAQSEAELISDEAQADLALRRGPAVLATKAAAGTKKYDLSKWKYAELRDTINTSCDIELLAACREEFHRRLKVYHAWKSKNKKRNTETEQRAPKSVTDYDFAPFLNNSPQQNPAAQIPARQREIEMNRQQRFFRIPFIRPADQYKDPQSKKKGWWYAHFDGPWIARQMELHPDKPPILLVAGKDDMEMCELNLEETGLTRKRGAEILPRQFEEIWERCGGIQYLQNAIESRQARPTYATAMLQSLLK

SEQ ID NO: 20175 - protein, 1257 aa, Artificial Sequence
  Synthetic polypeptide
AQEFETSLGDITFLALINQVFPAEEDSKKDVEDNCSLMYLNEATLLHNIKVRYSKDRIYTYVANILIAVNPYFDIPKIYSSEAIKSYQGKSLGTRPPHVFAIADKAFRDMKVLKMSQSIIVSGESGAGKTENTKFVLRYLTESYGTGQDIDDRIVEANPLLEAFGNAKTVRNNNSSRFGKFVEIHFNEKSSVVGGFVSHYLLEKSRICVQGKEERNYHIFYRLCAGASEDIREKLHLSSPDNFRYLNRGCTRYFANKETDKQILQNRKSPEYLKAGSMKDPLLDDHGDFIRMCTAMKKIGLDDEEKLDLFRVVAGVLHLGNIDFEEAGSTSGGCNLKNKSAQSLEYCAELLGLDQDDLRVSLTTRVMLTTAGGTKGTVIKVPLKVEQANNARDALAKTVYSHLFDHVVNRVNQCFPFETSSYFIGVLDIAGFEYFEHNSFEQFCINYCNEKLQQFFNERILKEEQELYQKEGLGVNEVHYVDNQDCIDLIEAKLVGILDILDEENRLPQPSDQHFTSAVHQKHKDHFRLTIPRKSKLAVHRNIRDDEGFIIRHFAGAVCYETTQFVEKNNDALHMSLESLICESRDKFIRELFESSTNNNKDTKQKAGKLSFISVGNKFKTQLNLLLDKLRSTGASFIRCIKPNLKMTSHHFEGAQILSQLQCSGMVSVLDLMQGGYPSRASFHELYNMYKKYMPDKLARLDPRLFCKALFKALGLNENDYKFGLTKVFFRPGKFAEFDQIMKSDPDHLAELVKRVNHWLTCSRWKKVQWCSLSVIKLKNKIKYRAEACIKMQKTIRMWLCKRRHKPRIDGLVKVGTLKKRLDKFNEVVSVLKDGKPEMNKQIKNLEISIDTLMAKIKSTMMTQEQIQKEYDALVKSSEELLSALQKKKQQEEEAERLRRIQEEMEKERKRREEDEKRRRKEEEERRMKLEMEAKRKQEEEERKKREDDEKRIQAEVEAQLARQKEEESQQQAVLEQERRDRELALRIAQSEAELISDEAQADLALRRNDGTRPKMTPEQMAKEMSEFLSRGPAVLATKAAAGTKKYDLSKWKYAELRDTINTSCDIELLAACREEFHRRLKVYHAWKSKNKKRNTETEQRAPKSVTDYDFAPFLNNSPQQNPAAQIPARQREIEMNRQQRFFRIPFIRPADQYKDPQSKKKGWWYAHFDGPWIARQMELHPDKPPILLVAGKDDMEMCELNLEETGLTRKRGAEILPRQFEEIWERCGGIQYLQNAIESRQARPTYATAMLQSLLK

SEQ ID NO: 20176 - protein, 1258 aa, Artificial Sequence
  Synthetic polypeptide
AQEFETSLGDITFLALINQVFPAEEDSKKDVEDNCSLMYLNEATLLHNIKVRYSKDRIYTYVANILIAVNPYFDIPKIYSSEAIKSYQGKSLGTRPPHVFAIADKAFRDMKVLKMSQSIIVSGESGAGKTENTKFVLRYLTESYGTGQDIDDRIVEANPLLEAFGNAKTVRNNNSSRFGKFVEIHFNEKSSVVGGFVSHYLLEKSRICVQGKEERNYHIFYRLCAGASEDIREKLHLSSPDNFRYLNRGCTRYFANKETDKQILQNRKSPEYLKAGSMKDPLLDDHGDFIRMCTAMKKIGLDDEEKLDLFRVVAGVLHLGNIDFEEAGSTSGGCNLKNKSAQSLEYCAELLGLDQDDLRVSLTTRVMLTTAGGTKGTVIKVPLKVEQANNARDALAKTVYSHLFDHVVNRVNQCFPFETSSYFIGVLDIAGFEYFEHNSFEQFCINYCNEKLQQFFNERILKEEQELYQKEGLGVNEVHYVDNQDCIDLIEAKLVGILDILDEENRLPQPSDQHFTSAVHQKHKDHFRLTIPRKSKLAVHRNIRDDEGFIIRHFAGAVCYETTQFVEKNNDALHMSLESLICESRDKFIRELFESSTNNNKDTKQKAGKLSFISVGNKFKTQLNLLLDKLRSTGASFIRCIKPNLKMTSHHFEGAQILSQLQCSGMVSVLDLMQGGYPSRASFHELYNMYKKYMPDKLARLDPRLFCKALFKALGLNENDYKFGLTKVFFRPGKFAEFDQIMKSDPDHLAELVKRVNHWLTCSRWKKVQWCSLSVIKLKNKIKYRAEACIKMQKTIRMWLCKRRHKPRIDGLVKVGTLKKRLDKFNEVVSVLKDGKPEMNKQIKNLEISIDTLMAKIKSTMMTQEQIQKEYDALVKSSEELLSALQKKKQQEEEAERLRRIQEEMEKERKRREEDEKRRRKEEEERRMKLEMEAKRKQEEEERKKREDDEKRIQAEVEAQLARQKEEESQQQAVLEQERRDRELALRIAQSEAELISDEAQADLALRRYLDSYPVTSKNDGTRPKMTPEQMAKEMSEFLSRGPAVLATKAAAGTKKYDLSKWKYAELRDTINTSCDIELLAACREEFHRRLKVYHAWKSKNKKRNTETEQRAPKSVTDYAQQNPAAQIPARQREIEMNRQQRFFRIPFIRPADQYKDPQSKKKGWWYAHFDGPWIARQMELHPDKPPILLVAGKDDMEMCELNLEETGLTRKRGAEILPRQFEEIWERCGGIQYLQNAIESRQARPTYATAMLQSLLK

SEQ ID NO: 20177 - protein, 20 aa, Artificial Sequence
  Synthetic polypeptide
PGRHNIFGSHKPSVSCRRGQ

SEQ ID NO: 20178 - protein, 37 aa, Artificial Sequence
  Synthetic polypeptide
KRKNLKQSCFQFQNFYKATIIRTNGTGIRIDIETKDL

SEQ ID NO: 20179 - protein, 150 aa, Artificial Sequence
  Synthetic polypeptide
KRKNLKQSCFQFQNFYKATIIRTNGTGIRIDIETKDLGISGTTTKKGDLQWNAGEKKLTGGANWQPKVAPATWSAGVPPSAPLQGAVPPTSSVPPVAGAPSVGQPGAGFGMPPAGTGMPMMPQQPVMFAQPMMRPPFGAAAVPGTQLQYL

SEQ ID NO: 20180 - protein, 176 aa, Artificial Sequence
  Synthetic polypeptide
KRKNLKQSCFQFQNFYKATIIRTNGTGIRIDIETKDLGISGTTTKKGDLQWNAGEKKLTGGANWQPKVAPATWSAGVPPSAPLQGAVPPTSSVPPVAGAPSVGQPGAGFGMPPAGTGMPMMPQQPVMFAQPMMRPPFGAAAVPGTQLSPSPTPASQSPKKPPAKDPLADLNIKDFL

SEQ ID NO: 20181 - protein, 44 aa, Artificial Sequence
  Synthetic polypeptide
NTQTILKKKKFEAIVFPISKLLQSYNNQDKWYWNKDRHRDQRSW

SEQ ID NO: 20182 - protein, 72 aa, Artificial Sequence
  Synthetic polypeptide
NTQTILKKKKFEAIVFPISKLLQSYNNQDKWYWNKDRHRDQRSWNFWYHNKKGRSSVECWREKVDWWSQLAA

SEQ ID NO: 20183 - protein, 5 aa, Artificial Sequence
  Synthetic polypeptide
RPKIL

SEQ ID NO: 20184 - protein, 25 aa, Artificial Sequence
  Synthetic polypeptide
RPKILEFLVPQQKREIFSGMLERKS

SEQ ID NO: 20185 - protein, 162 aa, Artificial Sequence
  Synthetic polypeptide
AFGGSWRVHTQALGNHEFDNGVEGLIEPLLKEAKFPILSANIKAKGPLASQISGLYLPYKVLPVGDEVVGIVGYTSKETPFLSNPGTNLVFEDEITALQPEVDKLKTLNVNKIIALGHSGFEMDKLIAQKVRGVDVVVGGHSNTFLYTGNCFKRIAWARMSR

SEQ ID NO: 20186 - protein, 422 aa, Artificial Sequence
  Synthetic polypeptide
AFGGSWRVHTQALGNHEFDNGVEGLIEPLLKEAKFPILSANIKAKGPLASQISGLYLPYKVLPVGDEVVGIVGYTSKETPFLSNPGTNLVFEDEITALQPEVDKLKTLNVNKIIALGHSGFEMDKLIAQKVRGVDVVVGGHSNTFLYTGNPPSKEVPAGKYPFIVTSDDGRKVPVVQAYAFGKYLGYLKIEFDERGNVISSHGNPILLNSSIPEDPSIKADINKWRIKLDNYSTQELGKTIVYLDGSSQSCRFRECNMGNLICDAMINNNLRHTDEMFWNHVSMCILNGGGIRSPIDERNNGIHVVYDLSRKPGDRVVKLDVLCTKCRVPSYDPLKMDEVYKVILPNFLANGGDGFQMIKDELLRHDSGDQDINVVSTYISKMKVIYPAVEGRIKFSTGSHCHGSFSLIFLSLWAVIFVLYQ

SEQ ID NO: 20187 - protein, 472 aa, Artificial Sequence
  Synthetic polypeptide
AFGGSWRVHTQALGNHEFDNGVEGLIEPLLKEAKFPILSANIKAKGPLASQISGLYLPYKVLPVGDEVVGIVGYTSKETPFLSNPGTNLVFEDEITALQPEVDKLKTLNVNKIIALGHSGFEMDKLIAQKVRGVDVVVGGHSNTFLYTGNPPSKEVPAGKYPFIVTSDDGRKVPVVQAYAFGKYLGYLKIEFDERGNVISSHGNPILLNSSIPEDPSIKADINKWRIKLDNYSTQELGKTIVYLDGSSQSCRFRECNMGNLICDAMINNNLRHTDEMFWNHVSMCILNGGGIRSPIDERNNGTITWENLAAVLPFGGTFDLVQLKGSTLKKAFEHSVHRYGQSTGEFLQVGGIHVVYDLSRKPGDRVVKLDVLCTKCRVPSYDPLKMDEVYKVILPNFLANGGDGFQMIKDELLRHDSGDQDINVVSTYISKMKVIYPAVEGRIKFSTGSHCHGSFSLIFLSLWAVIFVLYQ

SEQ ID NO: 20188 - protein, 18 aa, Artificial Sequence
  Synthetic polypeptide
LLSIWRFLEGAHPGTGKS

SEQ ID NO: 20189 - protein, 78 aa, Artificial Sequence
  Synthetic polypeptide
LQDGTSHQQVQEIRGSKSWNFRYHPPKSRKGGWDWRFSSTKTLEQDVRSFLVAEHLEVPGGCTPRHWEIMNLIMVWKD

SEQ ID NO: 20190 - protein, 13 aa, Artificial Sequence
  Synthetic polypeptide
GCWKRSLWSCLQS

SEQ ID NO: 20191 - protein, 493 aa, Artificial Sequence
  Synthetic polypeptide
IGNFSSWSLGFLLSKVVGRGAFGVVCKAKWRAKDVAIKQIESESERKAFIVELRQLSRVNHPNIVKLYGACLNPVCLVMEYAEGGSLYNVLHGAEPLPYYTAAHAMSWCLQCSQGVAYLHSMQPKALIHRDLKPPNLLLVAGGTVLKICDFGTACDIQTHMTNNKGSAAWMAPEVFEGSNYSEKCDVFSWGIILWEVITRRKPFDEIGGPAFRIMWAVHNGTRPPLIKNLPKPIESLMTRCWSKDPSQRPSMEEIVKIMTHLMRYFPGADEPLQYPCQYSDEGQSNSATSTGSFMDIASTNTSNKSDTNMEQVPATNDTIKRLESKLLKNQAKQQSESGRLSLGASRGSSVESLPPTSEGKRMSADMSEIEARIAATTAYSKPKRGHRKTASFGNILDVPEIVISGNGQPRRRSIQDLTVTGTEPGQVSSRSSSPSVRMITTSGPTSEKPTRSHPWTPDDSTDTNGSDNSIPMAYLTLDHQLQARTSCRTGPG

SEQ ID NO: 20192 - protein, 581 aa, Artificial Sequence
  Synthetic polypeptide
IGNFSSWSLGFLLSKVVGRGAFGVVCKAKWRAKDVAIKQIESESERKAFIVELRQLSRVNHPNIVKLYGACLNPVCLVMEYAEGGSLYNVLHGAEPLPYYTAAHAMSWCLQCSQGVAYLHSMQPKALIHRDLKPPNLLLVAGGTVLKICDFGTACDIQTHMTNNKGSAAWMAPEVFEGSNYSEKCDVFSWGIILWEVITRRKPFDEIGGPAFRIMWAVHNGTRPPLIKNLPKPIESLMTRCWSKDPSQRPSMEEIVKIMTHLMRYFPGADEPLQYPCQYSDEGQSNSATSTGSFMDIASTNTSNKSDTNMEQVPATNDTIKRLESKLLKNQAKQQSESGRLSLGASRGSSVESLPPTSEGKRMSADMSEIEARIAATTAYSKPKRGHRKTASFGNILDVPEIVISGNGQPRRRSIQDLTVTGTEPGQVSSRSSSPSVRMITTSGPTSEKPTRSHPWTPDDSTDTNGSDNSIPMAYLTLDHQLQPLAPCPNSKESMAVFEQHCKMAQEYMKVQTEIALLLQRKQELVAELDQDEKDQQNTSRLVQEHKKLLDENKSLSTYYQQCKKQLEVIRSQQQKRQGTS

SEQ ID NO: 20193 - protein, 466 aa, Artificial Sequence
  Synthetic polypeptide
IGNFSSWSLGFLLSKVVGRGAFGVVCKAKWRAKDVAIKQIESESERKAFIVELRQLSRVNHPNIVKLYGACLNPVCLVMEYAEGGSLYNVLHGAEPLPYYTAAHAMSWCLQCSQGVAYLHSMQPKALIHRDLKPPNLLLVAGGTVLKICDFGTACDIQTHMTNNKGSAAWMAPEVFEGSNYSEKCDVFSWGIILWEVITRRKPFDEIGGPAFRIMWAVHNGTRPPLIKNLPKPIESLMTRCWSKDPSQRPSMEEIVKIMTHLMRYFPGADEPLQYPCQYSDEGQSNSATSTGSFMDIASTNTSNKSDTNMEQVPATNDTIKRLESKLLKNQAKQQSESGRLSLGASRGSSVESLPPTSEGKRMSADMSEIEARIAATTGNGQPRRRSIQDLTVTGTEPGQVSSRSSSPSVRMITTSGPTSEKPTRSHPWTPDDSTDTNGSDNSIPMAYLTLDHQLQARTSCRTGPG

SEQ ID NO: 20194 - protein, 554 aa, Artificial Sequence
  Synthetic polypeptide
IGNFSSWSLGFLLSKVVGRGAFGVVCKAKWRAKDVAIKQIESESERKAFIVELRQLSRVNHPNIVKLYGACLNPVCLVMEYAEGGSLYNVLHGAEPLPYYTAAHAMSWCLQCSQGVAYLHSMQPKALIHRDLKPPNLLLVAGGTVLKICDFGTACDIQTHMTNNKGSAAWMAPEVFEGSNYSEKCDVFSWGIILWEVITRRKPFDEIGGPAFRIMWAVHNGTRPPLIKNLPKPIESLMTRCWSKDPSQRPSMEEIVKIMTHLMRYFPGADEPLQYPCQYSDEGQSNSATSTGSFMDIASTNTSNKSDTNMEQVPATNDTIKRLESKLLKNQAKQQSESGRLSLGASRGSSVESLPPTSEGKRMSADMSEIEARIAATTGNGQPRRRSIQDLTVTGTEPGQVSSRSSSPSVRMITTSGPTSEKPTRSHPWTPDDSTDTNGSDNSIPMAYLTLDHQLQPLAPCPNSKESMAVFEQHCKMAQEYMKVQTEIALLLQRKQELVAELDQDEKDQQNTSRLVQEHKKLLDENKSLSTYYQQCKKQLEVIRSQQQKRQGTS

SEQ ID NO: 20195 - protein, 38 aa, Artificial Sequence
  Synthetic polypeptide
VTSVLGALVFFSLRLLEEEPLELFAKLSGEQKMLLLNK

SEQ ID NO: 20196 - protein, 46 aa, Artificial Sequence
  Synthetic polypeptide
AGHDGSHLQSQHFRRPRQEDRLRPGIQGNTEAQRPCGPPRMAGEPP

SEQ ID NO: 20197 - protein, 102 aa, Artificial Sequence
  Synthetic polypeptide
AGHDGSHLQSQHFRRPRQEDRLRPGIQGNTEAQRPCGPPRMAGEPPRLPLSPGPRATTAASGQQSQDLHPHQQHLRLHRRPLRARSLRCHRGPEGCMGPRSS

SEQ ID NO: 20198 - protein, 32 aa, Artificial Sequence
  Synthetic polypeptide
EAKTGGSLEARNSRQHGSSKALWPPKNGRGAS

SEQ ID NO: 20199 - protein, 24 aa, Artificial Sequence
  Synthetic polypeptide
GQEFKATRKLKGPVAPQEWQGSLL

SEQ ID NO: 20200 - protein, 80 aa, Artificial Sequence
  Synthetic polypeptide
GQEFKATRKLKGPVAPQEWQGSLLGSPYHLGPGPRLRLVVNNHRTSTPINNIFGCIEGRSEPDHYVVIGAQRDAWGPGAA

SEQ ID NO: 20201 - protein, 440 aa, Artificial Sequence
  Synthetic polypeptide
GQEFKATRKLKGPVAPQEWQGSLLGSPYHLGPGPRLRLVVNNHRTSTPINNIFGCIEGRSEPDHYVVIGAQRDAWGPGAAKSAVGTAILLELVRTFSSMVSNGFRPRRSLLFISWDGGDFGSVGSTEWLEGYLSVLHLKAVVYVSLDNAVLGDDKFHAKTSPLLTSLIESVLKQVDSPNHSGQTLYEQVVFTNPSWDAEVIRPLPMDSSAYSFTAFVGVPAVEFSFMEDDQAYPFLHTKEDTYENLHKVLQGRLPAVAQAVAQLAGQLLIRLSHDRLLPLDFGRYGDVVLRHIGNLNEFSGDLKARGLTLQWVYSARGDYIRAAEKLRQEIYSSEERDERLTRMYNVRIMRVEFYFLSQYVSPADSPFRHIFMGRGDHTLGALLDHLRLLRSNSSGTPGATSSTGFQESRFRRQLALLTWTLQGAANALSGDVWNIDNNF

SEQ ID NO: 20202 - protein, 548 aa, Artificial Sequence
  Synthetic polypeptide
AGHDGSHLQSQHFRRPRQEDRLRPGIQGNTVTNAQDFGAQGVLIYPEPADFSQDPPKPSLSSQQAVYGHVHLGTGDPYTPGFPSFNQTQFPPVASSGLPSIPAQPISADIASRLLRKLKGPVAPQEWQGSLLGSPYHLGPGPRLRLVVNNHRTSTPINNIFGCIEGRSEPDHYVVIGAQRDAWGPGAAKSAVGTAILLELVRTFSSMVSNGFRPRRSLLFISWDGGDFGSVGSTEWLEGYLSVLHLKAVVYVSLDNAVLGDDKFHAKTSPLLTSLIESVLKQVDSPNHSGQTLYEQVVFTNPSWDAEVIRPLPMDSSAYSFTAFVGVPAVEFSFMEDDQAYPFLHTKEDTYENLHKVLQGRLPAVAQAVAQLAGQLLIRLSHDRLLPLDFGRYGDVVLRHIGNLNEFSGDLKARGLTLQWVYSARGDYIRAAEKLRQEIYSSEERDERLTRMYNVRIMRVEFYFLSQYVSPADSPFRHIFMGRGDHTLGALLDHLRLLRSNSSGTPGATSSTGFQESRFRRQLALLTWTLQGAANALSGDVWNIDNNF

SEQ ID NO: 20203 - protein, 164 aa, Artificial Sequence
  Synthetic polypeptide
AGHDGSHLQSQHFRRPRQEDRLRPGIQGNTVTNAQDFGAQGVLIYPEPADFSQDPPKPSLSSQQAVYGHVHLGTGDPYTPGFPSFNQTQFPPVASSGLPSIPAQPISADIASRLLRLECSGAILAHCNLHLPGSSDSSASDSRVSRITGSSKALWPPKNGRGAS

SEQ ID NO: 20204 - protein, 121 aa, Artificial Sequence
  Synthetic polypeptide
EAKTGGSLEARNSRQHGDQCSGLRGSRSAHIPRASGLLPGPTQAKPVQPAGSVWTCAPGNWRPLHTWLPFLQSNPVPSSCIIRPSQHPSPAHQCRHCLPPAEAGVQWCNLGSLQPPPPGFK

SEQ ID NO: 20205 - protein, 174 aa, Artificial Sequence
  Synthetic polypeptide
EAKTGGSLEARNSRQHGDQCSGLRGSRSAHIPRASGLLPGPTQAKPVQPAGSVWTCAPGNWRPLHTWLPFLQSNPVPSSCIIRPSQHPSPAHQCRHCLPPAEEAQRPCGPPRMAGEPPRLPLSPGPRATTAASGQQSQDLHPHQQHLRLHRRPLRARSLRCHRGPEGCMGPRSS

SEQ ID NO: 20206 - protein, 8 aa, Artificial Sequence
  Synthetic polypeptide
GQEFKATR

SEQ ID NO: 20207 - protein, 1910 aa, Artificial Sequence
  Synthetic polypeptide
EQPGQHNVLTQCDFEDDAKPLCDWSQVSADDEDWVRASGPSPTGSTGAPGGYPNGEGSYLHMESNSFHRGGVARLLSPDLWEQGPLCVHFAHHMFGLSWGAQLRLLLLSGEEGRRPDVLWKHWNTQRPSWMLTTVTVPAGFTLPTRLMFEGTRGSTAYLDIALDALSIRRGSCNRVCMMQTCSFDIPNDLCDWTWIPTASGAKWTQKKGSSGKPGVGPDGDFSSPGSGCYMLLDPKNARPGQKAVLLSPVSLSSGCLSFSFHYILRGQSPGAALHIYASVLGSIRKHTLFSGQPGPNWQAVSVNYTAVGRIQFAVVGVFGKTPEPAVAVDATSIAPCGEGFPQCDFEDNAHPFCDWVQTSGDGGHWALGHKNGPVHGMGPAGGFPNAGGHYIYLEADEFSQAGQSVRLVSRPFCAPGDICVEFAYHMYGLGEGTMLELLLGSPAGSPPIPLWKRVGSQRPYWQNTSVTVPSGHQQPMQLIFKGIQGSNTASVVAMGFILINPGTCPVKVLPELPPVSPVSSTGPSETTGLTENPTISTKKPTVSIEKPSVTTEKPTVPKEKPTIPTEKPTISTEKPTIPSEKPNMPSEKPTIPSEKPTILTEKPTIPSEKPTIPSEKPTISTEKPTVPTEEPTTPTEETTTSMEEPVIPTEKPSIPTEKPSIPTEKPTISMEETIISTEKPTISPEKPTIPTEKPTIPTEKSTISPEKPTTPTEKPTIPTEKPTISPEKPTTPTEKPTISPEKLTIPTEKPTIPTEKPTIPTEKPTISTEEPTTPTEETTISTEKPSIPMEKPTLPTEETTTSVEETTISTEKLTIPMEKPTISTEKPTIPTEKPTISPEKLTIPTEKLTIPTEKPTIPIEETTISTEKLTIPTEKPTISPEKPTISTEKPTIPTEKPTIPTEETTISTEKLTIPTEKPTISPEKLTIPTEKPTISTEKPTIPTEKLTIPTEKPTIPTEKPTIPTEKLTALRPPHPSPTATGLAALVMSPHAPSTPMTSVILGTTTTSRSSTERCPPNARYESCACPASCKSPRPSCGPLCREGCVCNPGFLFSDNHCIQASSCNCFYNNDYYEPGAEWFSPNCTEHCRCWPGSRVECQISQCGTHTVCQLKNGQYGCHPYAGTATCLVYGDPHYVTFDGRHFGFMGKCTYILAQPCGNSTDPFFRVTAKNEEQGQEGVSCLSKVYVTLPESTVTLLKGRRTLVGGQQVTLPAIPSKGVFLGASGRFVELQTEFGLRVRWDGDQQLYVTVSSTYSGKLCGLCGNYDGNSDNDHLKLDGSPAGDKEELGNSWQTDQDEDQECQKYQVVNSPSCDSSLQSSMSGPGFCGRLVDTHGPFETCLLHVKAASFFDSCMLDMCGFQGLQHLLCTHMSTMTTTCQDAGHAVKPWREPHFCPMACPPNSKYSLCAKPCPDTCHSGFSGMFCSDRCVEACECNPGFVLSGLECIPRSQCGCLHPAGSYFKVGERWYKPGCKELCVCESNNRIRCQPWRCRAQEFCGQQDGIYGCHAQGAATCTASGDPHYLTFDGALHHFMGTCTYVLTRPCWSRSQDSYFVVSATNENRGGILEVSYIKAVHVTVFDLSISLLRGCKVMLNGHRVALPVWLAQGRVTIRLSSNLVLLYTNFGLQVRYDGSHLVEVTVPSSYGGQLCGLCGNYNNNSLDDNLRPDRKLAGDSMQLGAAWKLPESSEPGCFLVGGKPSSCQENSMADAWNKNCAILINPQGPFSQCHQVVPPQSSFASCVHGQCGTKGDTTALCRSLQAYASLCAQAGQAPAWRNRTFCPMRCPPGSSYSPCSSPCPDTCSSINNPRDCPKALPCAESCECQKGHILSGTSCVPLGQCGCTDPAGSYHPVGERWYTENTCTRLCTCSVHNNITCFQSTCKPNQICWALDGLLRFGPQVWECVSSQGSPTT

SEQ ID NO: 20208 - protein, 2594 aa, Artificial Sequence
  Synthetic polypeptide
EQPGQHNVLTQCDFEDDAKPLCDWSQVSADDEDWVRASGPSPTGSTGAPGGYPNGEGSYLHMESNSFHRGGVARLLSPDLWEQGPLCVHFAHHMFGLSWGAQLRLLLLSGEEGRRPDVLWKHWNTQRPSWMLTTVTVPAGFTLPTRLMFEGTRGSTAYLDIALDALSIRRGSCNRVCMMQTCSFDIPNDLCDWTWIPTASGAKWTQKKGSSGKPGVGPDGDFSSPGSGCYMLLDPKNARPGQKAVLLSPVSLSSGCLSFSFHYILRGQSPGAALHIYASVLGSIRKHTLFSGQPGPNWQAVSVNYTAVGRIQFAVVGVFGKTPEPAVAVDATSIAPCGEGFPQCDFEDNAHPFCDWVQTSGDGGHWALGHKNGPVHGMGPAGGFPNAGGHYIYLEADEFSQAGQSVRLVSRPFCAPGDICVEFAYHMYGLGEGTMLELLLGSPAGSPPIPLWKRVGSQRPYWQNTSVTVPSGHQQPMQLIFKGIQGSNTASVVAMGFILINPGTCPVKVLPELPPVSPVSSTGPSETTGLTENPTISTKKPTVSIEKPSVTTEKPTVPKEKPTIPTEKPTISTEKPTIPSEKPNMPSEKPTIPSEKPTILTEKPTIPSEKPTIPSEKPTISTEKPTVPTEEPTTPTEETTTSMEEPVIPTEKPSIPTEKPSIPTEKPTISMEETIISTEKPTISPEKPTIPTEKPTIPTEKSTISPEKPTTPTEKPTIPTEKPTISPEKPTTPTEKPTISPEKLTIPTEKPTIPTEKPTIPTEKPTISTEEPTTPTEETTISTEKPSIPMEKPTLPTEETTTSVEETTISTEKLTIPMEKPTISTEKPTIPTEKPTISPEKLTIPTEKLTIPTEKPTIPIEETTISTEKLTIPTEKPTISPEKPTISTEKPTIPTEKPTIPTEETTISTEKLTIPTEKPTISPEKLTIPTEKPTISTEKPTIPTEKLTIPTEKPTIPTEKPTIPTEKLTALRPPHPSPTATGLAALVMSPHAPSTPMTSVILGTTTTSRSSTERCPPNARYESCACPASCKSPRPSCGPLCREGCVCNPGFLFSDNHCIQASSCNCFYNNDYYEPGAEWFSPNCTEHCRCWPGSRVECQISQCGTHTVCQLKNGQYGCHPYAGTATCLVYGDPHYVTFDGRHFGFMGKCTYILAQPCGNSTDPFFRVTAKNEEQGQEGVSCLSKVYVTLPESTVTLLKGRRTLVGGQQVTLPAIPSKGVFLGASGRFVELQTEFGLRVRWDGDQQLYVTVSSTYSGKLCGLCGNYDGNSDNDHLKLDGSPAGDKEELGNSWQTDQDEDQECQKYQVVNSPSCDSSLQSSMSGPGFCGRLVDTHGPFETCLLHVKAASFFDSCMLDMCGFQGLQHLLCTHMSTMTTTCQDAGHAVKPWREPHFCPMACPPNSKYSLCAKPCPDTCHSGFSGMFCSDRCVEACECNPGFVLSGLECIPRSQCGCLHPAGSYFKVGERWYKPGCKELCVCESNNRIRCQPWRCRAQEFCGQQDGIYGCHAQGAATCTASGDPHYLTFDGALHHFMGTCTYVLTRPCWSRSQDSYFVVSATNENRGGILEVSYIKAVHVTVFDLSISLLRGCKVMLNGHRVALPVWLAQGRVTIRLSSNLVLLYTNFGLQVRYDGSHLVEVTVPSSYGGQLCGLCGNYNNNSLDDNLRPDRKLAGDSMQLGAAWKLPESSEPGCFLVGGKPSSCQENSMADAWNKNCAILINPQGPFSQCHQVVPPQSSFASCVHGQCGTKGDTTALCRSLQAYASLCAQAGQAPAWRNRTFCPMRCPPGSSYSPCSSPCPDTCSSINNPRDCPKALPCAESCECQKGHILSGTSCVPLGQCGCTDPAGSYHPVGERWYTENTCTRLCTCSVHNNITCFQSTCKPNQICWALDGLLRRASGVGVCQLPGESHYVSFDGSNHSIPDACTLVLVKVCHPAMALPFFKISAKHEKEEGGTEAFRLHEVYIDIYDAQVTLQKGHRVLINSKQVTLPAISQIPGVSVKSSSIYSIVNIKIGVQVKFDGNHLLEIEIPTTYYGKVCGMCGNFNDEEEDELMMPSDEVANSDSEFVNSWKDKDIDPSCQSLLVDEQQIPAEQQENPSGNCRAADLRRAREKCEAALRAPVWAQCASRIDLTPFLVDCANTLCEFGGLYQALCQALQAFGATCQSQGLKPPLWRNSSFCPLECPAYSSYTNCLPSCSPSCWDLDGRCEGAKVPSACAEGCICQPGYVLSEDKCVPRSQCGCKDAHGGSIPLGKSWVSSGCTEKCVCTGGAIQCGDFRCPSGSHCQLTSDNSNSNCVSDKSEQCSVYGDPRYLTFDGFSYRLQGRMTYVLIKTVDVLPEGVEPLLVEGRNKMDPPRSSIFLQEVITTVYGYKVQLQAGLELVVNNQKMAVPYRPNEHLRVTLWGQRLYLVTDFELVVSFGGRKNAVISLPSMYEGLVSGLCGNYDKNRKNDMMLPSGALTQNLNTFGNSWEVKTEDALLRFPRAIPAEEEGQGAELGLRTGLQVSECSPEQLASNSTQACRVLADPQGPFAACHQTVAPEPFQEHCVLDLCSAQDPREQEELRCQVLSGYAILCQEAGAALAGWRDRTLCAGQQLSD

SEQ ID NO: 20209 - protein, 2659 aa, Artificial Sequence
  Synthetic polypeptide
EQPGQHNVLTQCDFEDDAKPLCDWSQVSADDEDWVRASGPSPTGSTGAPGGYPNGEGSYLHMESNSFHRGGVARLLSPDLWEQGPLCVHFAHHMFGLSWGAQLRLLLLSGEEGRRPDVLWKHWNTQRPSWMLTTVTVPAGFTLPTRLMFEGTRGSTAYLDIALDALSIRRGSCNRVCMMQTCSFDIPNDLCDWTWIPTASGAKWTQKKGSSGKPGVGPDGDFSSPGSGCYMLLDPKNARPGQKAVLLSPVSLSSGCLSFSFHYILRGQSPGAALHIYASVLGSIRKHTLFSGQPGPNWQAVSVNYTAVGRIQFAVVGVFGKTPEPAVAVDATSIAPCGEGFPQCDFEDNAHPFCDWVQTSGDGGHWALGHKNGPVHGMGPAGGFPNAGGHYIYLEADEFSQAGQSVRLVSRPFCAPGDICVEFAYHMYGLGEGTMLELLLGSPAGSPPIPLWKRVGSQRPYWQNTSVTVPSGHQQPMQLIFKGIQGSNTASVVAMGFILINPGTCPVKVLPELPPVSPVSSTGPSETTGLTENPTISTKKPTVSIEKPSVTTEKPTVPKEKPTIPTEKPTISTEKPTIPSEKPNMPSEKPTIPSEKPTILTEKPTIPSEKPTIPSEKPTISTEKPTVPTEEPTTPTEETTTSMEEPVIPTEKPSIPTEKPSIPTEKPTISMEETIISTEKPTISPEKPTIPTEKPTIPTEKSTISPEKPTTPTEKPTIPTEKPTISPEKPTTPTEKPTISPEKLTIPTEKPTIPTEKPTIPTEKPTISTEEPTTPTEETTISTEKPSIPMEKPTLPTEETTTSVEETTISTEKLTIPMEKPTISTEKPTIPTEKPTISPEKLTIPTEKLTIPTEKPTIPIEETTISTEKLTIPTEKPTISPEKPTISTEKPTIPTEKPTIPTEETTISTEKLTIPTEKPTISPEKLTIPTEKPTISTEKPTIPTEKLTIPTEKPTIPTEKPTIPTEKLTALRPPHPSPTATGLAALVMSPHAPSTPMTSVILGTTTTSRSSTERCPPNARYESCACPASCKSPRPSCGPLCREGCVCNPGFLFSDNHCIQASSCNCFYNNDYYEPGAEWFSPNCTEHCRCWPGSRVECQISQCGTHTVCQLKNGQYGCHPYAGTATCLVYGDPHYVTFDGRHFGFMGKCTYILAQPCGNSTDPFFRVTAKNEEQGQEGVSCLSKVYVTLPESTVTLLKGRRTLVGGQQVTLPAIPSKGVFLGASGRFVELQTEFGLRVRWDGDQQLYVTVSSTYSGKLCGLCGNYDGNSDNDHLKLDGSPAGDKEELGNSWQTDQDEDQECQKYQVVNSPSCDSSLQSSMSGPGFCGRLVDTHGPFETCLLHVKAASFFDSCMLDMCGFQGLQHLLCTHMSTMTTTCQDAGHAVKPWREPHFCPMACPPNSKYSLCAKPCPDTCHSGFSGMFCSDRCVEACECNPGFVLSGLECIPRSQCGCLHPAGSYFKVGERWYKPGCKELCVCESNNRIRCQPWRCRAQEFCGQQDGIYGCHAQGAATCTASGDPHYLTFDGALHHFMGTCTYVLTRPCWSRSQDSYFVVSATNENRGGILEVSYIKAVHVTVFDLSISLLRGCKVMLNGHRVALPVWLAQGRVTIRLSSNLVLLYTNFGLQVRYDGSHLVEVTVPSSYGGQLCGLCGNYNNNSLDDNLRPDRKLAGDSMQLGAAWKLPESSEPGCFLVGGKPSSCQENSMADAWNKNCAILINPQGPFSQCHQVVPPQSSFASCVHGQCGTKGDTTALCRSLQAYASLCAQAGQAPAWRNRTFCPMRCPPGSSYSPCSSPCPDTCSSINNPRDCPKALPCAESCECQKGHILSGTSCVPLGQCGCTDPAGSYHPVGERWYTENTCTRLCTCSVHNNITCFQSTCKPNQICWALDGLLRRASGVGVCQLPGESHYVSFDGSNHSIPDACTLVLVKVCHPAMALPFFKISAKHEKEEGGTEAFRLHEVYIDIYDAQVTLQKGHRVLINSKQVTLPAISQIPGVSVKSSSIYSIVNIKIGVQVKFDGNHLLEIEIPTTYYGKVCGMCGNFNDEEEDELMMPSDEVANSDSEFVNSWKDKDIDPSCQSLLVDEQQIPAEQQENPSGNCRAADLRRAREKCEAALRAPVWAQCASRIDLTPFLVDCANTLCEFGGLYQALCQALQAFGATCQSQGLKPPLWRNSSFCPLECPAYSSYTNCLPSCSPSCWDLDGRCEGAKVPSACAEGCICQPGYVLSEDKCVPRSQCGCKDAHGGSIPLGKSWVSSGCTEKCVCTGGAIQCGDFRCPSGSHCQLTSDNSNSNCVSDKSEQCSVYGDPRYLTFDGFSYRLQGRMTYVLIKTVDVLPEGVEPLLVEGRNKMDPPRSSIFLQEVITTVYGYKVQLQAGLELVVNNQKMAVPYRPNEHLRVTLWGQRLYLVTDFELVVSFGGRKNAVISLPSMYEGLVSGLCGNYDKNRKNDMMLPSGALTQNLNTFGNSWEVKTEDALLRFPRAIPAEEEGQGAELGLRTGLQVSECSPEQLASNSTQACRVLADPQGPFAACHQTVAPEPFQEHCVLDLCSAQDPREQEELRCQVLSGYAILCQEAGAALAGWRDRTLCAMECPAGTIYQSCMTPCPASCANLADPGDCEGPCVEGCASIPGYAYSGTQSLPWLTVAAPAMASTTSWAAAF

SEQ ID NO: 20210 - protein, 2691 aa, Artificial Sequence
  Synthetic polypeptide
EQPGQHNVLTQCDFEDDAKPLCDWSQVSADDEDWVRASGPSPTGSTGAPGGYPNGEGSYLHMESNSFHRGGVARLLSPDLWEQGPLCVHFAHHMFGLSWGAQLRLLLLSGEEGRRPDVLWKHWNTQRPSWMLTTVTVPAGFTLPTRLMFEGTRGSTAYLDIALDALSIRRGSCNRVCMMQTCSFDIPNDLCDWTWIPTASGAKWTQKKGSSGKPGVGPDGDFSSPGSGCYMLLDPKNARPGQKAVLLSPVSLSSGCLSFSFHYILRGQSPGAALHIYASVLGSIRKHTLFSGQPGPNWQAVSVNYTAVGRIQFAVVGVFGKTPEPAVAVDATSIAPCGEGFPQCDFEDNAHPFCDWVQTSGDGGHWALGHKNGPVHGMGPAGGFPNAGGHYIYLEADEFSQAGQSVRLVSRPFCAPGDICVEFAYHMYGLGEGTMLELLLGSPAGSPPIPLWKRVGSQRPYWQNTSVTVPSGHQQPMQLIFKGIQGSNTASVVAMGFILINPGTCPVKVLPELPPVSPVSSTGPSETTGLTENPTISTKKPTVSIEKPSVTTEKPTVPKEKPTIPTEKPTISTEKPTIPSEKPNMPSEKPTIPSEKPTILTEKPTIPSEKPTIPSEKPTISTEKPTVPTEEPTTPTEETTTSMEEPVIPTEKPSIPTEKPSIPTEKPTISMEETIISTEKPTISPEKPTIPTEKPTIPTEKSTISPEKPTTPTEKPTIPTEKPTISPEKPTTPTEKPTISPEKLTIPTEKPTIPTEKPTIPTEKPTISTEEPTTPTEETTISTEKPSIPMEKPTLPTEETTTSVEETTISTEKLTIPMEKPTISTEKPTIPTEKPTISPEKLTIPTEKLTIPTEKPTIPIEETTISTEKLTIPTEKPTISPEKPTISTEKPTIPTEKPTIPTEETTISTEKLTIPTEKPTISPEKLTIPTEKPTISTEKPTIPTEKLTIPTEKPTIPTEKPTIPTEKLTALRPPHPSPTATGLAALVMSPHAPSTPMTSVILGTTTTSRSSTERCPPNARYESCACPASCKSPRPSCGPLCREGCVCNPGFLFSDNHCIQASSCNCFYNNDYYEPGAEWFSPNCTEHCRCWPGSRVECQISQCGTHTVCQLKNGQYGCHPYAGTATCLVYGDPHYVTFDGRHFGFMGKCTYILAQPCGNSTDPFFRVTAKNEEQGQEGVSCLSKVYVTLPESTVTLLKGRRTLVGGQQVTLPAIPSKGVFLGASGRFVELQTEFGLRVRWDGDQQLYVTVSSTYSGKLCGLCGNYDGNSDNDHLKLDGSPAGDKEELGNSWQTDQDEDQECQKYQVVNSPSCDSSLQSSMSGPGFCGRLVDTHGPFETCLLHVKAASFFDSCMLDMCGFQGLQHLLCTHMSTMTTTCQDAGHAVKPWREPHFCPMACPPNSKYSLCAKPCPDTCHSGFSGMFCSDRCVEACECNPGFVLSGLECIPRSQCGCLHPAGSYFKVGERWYKPGCKELCVCESNNRIRCQPWRCRAQEFCGQQDGIYGCHAQGAATCTASGDPHYLTFDGALHHFMGTCTYVLTRPCWSRSQDSYFVVSATNENRGGILEVSYIKAVHVTVFDLSISLLRGCKVMLNGHRVALPVWLAQGRVTIRLSSNLVLLYTNFGLQVRYDGSHLVEVTVPSSYGGQLCGLCGNYNNNSLDDNLRPDRKLAGDSMQLGAAWKLPESSEPGCFLVGGKPSSCQENSMADAWNKNCAILINPQGPFSQCHQVVPPQSSFASCVHGQCGTKGDTTALCRSLQAYASLCAQAGQAPAWRNRTFCPMRCPPGSSYSPCSSPCPDTCSSINNPRDCPKALPCAESCECQKGHILSGTSCVPLGQCGCTDPAGSYHPVGERWYTENTCTRLCTCSVHNNITCFQSTCKPNQICWALDGLLRRASGVGVCQLPGESHYVSFDGSNHSIPDACTLVLVKVCHPAMALPFFKISAKHEKEEGGTEAFRLHEVYIDIYDAQVTLQKGHRVLINSKQVTLPAISQIPGVSVKSSSIYSIVNIKIGVQVKFDGNHLLEIEIPTTYYGKVCGMCGNFNDEEEDELMMPSDEVANSDSEFVNSWKDKDIDPSCQSLLVDEQQIPAEQQENPSGNCRAADLRRAREKCEAALRAPVWAQCASRIDLTPFLVDCANTLCEFGGLYQALCQALQAFGATCQSQGLKPPLWRNSSFCPLECPAYSSYTNCLPSCSPSCWDLDGRCEGAKVPSACAEGCICQPGYVLSEDKCVPRSQCGCKDAHGGSIPLGKSWVSSGCTEKCVCTGGAIQCGDFRCPSGSHCQLTSDNSNSNCVSDKSEQCSVYGDPRYLTFDGFSYRLQGRMTYVLIKTVDVLPEGVEPLLVEGRNKMDPPRSSIFLQEVITTVYGYKVQLQAGLELVVNNQKMAVPYRPNEHLRVTLWGQRLYLVTDFELVVSFGGRKNAVISLPSMYEGLVSGLCGNYDKNRKNDMMLPSGALTQNLNTFGNSWEVKTEDALLRFPRAIPAEEEGQGAELGLRTGLQVSECSPEQLASNSTQACRVLADPQGPFAACHQTVAPEPFQEHCVLDLCSAQDPREQEELRCQVLSGYAILCQEAGAALAGWRDRTLCESPCLQNPCQNDGQCREQGATFTCECEVGYGGGLCMEPRDAPPPRKPASNLVGVLLGLLVPVVVVLLAVTRECIYRTRRKREKTQEGDRLARLVDTDTVLDCAC

SEQ ID NO: 20211 - protein, 151 aa, Artificial Sequence
  Synthetic polypeptide
GQEFESSLGNIMSSPSVILRMTPNPSVTGPKCPQTMKTGFEPVGPLPPAPPGPPGGTLTERAAICIWNRTASTVGEWPACSAPTYGSKAPSVCTLPTTCSGCLGAPSSGCCCSRVKRAAAPMCSGNTGTPRDPPGCSPPSLCPQGSPCPPG

SEQ ID NO: 20212 - protein, 50 aa, Artificial Sequence
  Synthetic polypeptide
GRRIAGAQEFQTSLGNRARASPQIQKLARTLLQEDYGFFRAISLWPPLVL

SEQ ID NO: 20213 - protein, 123 aa, Artificial Sequence
  Synthetic polypeptide
GRRIAGAQEFQTSLGNRARASPQIQKLARTLLQEDYGFFRAISLWPPLVLIGIYATALSASMSSLIGASRILHALARDDLFGVILAPAKVVSRGGNPWAAVLYSWGLVQLVLLAGKLNTLAAV

SEQ ID NO: 20214 - protein, 140 aa, Artificial Sequence
  Synthetic polypeptide
GRRIAGAQEFQTSLGNRARASPQIQKLARTLLQEDYGFFRAISLWPPLVLIGIYATALSASMSSLIGASRILHALARDDLFGVILAPAKVVSRGGNPWAAVLYSWGLVQLVLLAGKLNTLAAVVTVFYLVAYAAVDLSCL

SEQ ID NO: 20215 - protein, 334 aa, Artificial Sequence
  Synthetic polypeptide
GRRIAGAQEFQTSLGNRARASPQIQKLARTLLQEDYGFFRAISLWPPLVLIGIYATALSASMSSLIGASRILHALARDDLFGVILAPAKVVSRGGNPWAAVLYSWGLVQLVLLAGKLNTLAAVVTVFYLVAYAAVDLSCLSLEWASAPNFRPTFSLFSWHTCLLGVASCLLMMFLISPGAAGGSLLLMGLLAALLTARGGPSSWGYVSQALLFHQVRKYLLRLDVRKDHVKFWRPQLLLLVGNPRGALPLLRLANQLKKGGLYVLGHVTLGDLDSLPSDPVQPQYGAWLSLVDRAQVKAFVDLTLSPSVRQGAQHLLRISGLESGTLLPWGFRS

SEQ ID NO: 20216 - protein, 330 aa, Artificial Sequence
  Synthetic polypeptide
GRRIAGAQEFQTSLGNRARASPQIQKLARTLLQEDYGFFRAISLWPPLVLIGIYATALSASMSSLIGASRILHALARDDLFGVILAPAKVVSRGGNPWAAVLYSWGLVQLVLLAGKLNTLAAVVTVFYLVAYAAVDLSCLSLEWASAPNFRPTFSLFSWHTCLLGVASCLLMMFLISPGAAGGSLLLMGLLAALLTARGGPSSWGYVSQALLFHQVRKYLLRLDVRKDHVKFWRPQLLLLVGNPRGALPLLRLANQLKKGGLYVLGHVTLGDLDSLPSDPVQPQYGAWLSLVDRAQVKAFVDLTLSPSVRQGAQHLLRISGLESNSHPLP

SEQ ID NO: 20217 - protein, 617 aa, Artificial Sequence
  Synthetic polypeptide
GRRIAGAQEFQTSLGNRARASPQIQKLARTLLQEDYGFFRAISLWPPLVLIGIYATALSASMSSLIGASRILHALARDDLFGVILAPAKVVSRGGNPWAAVLYSWGLVQLVLLAGKLNTLAAVVTVFYLVAYAAVDLSCLSLEWASAPNFRPTFSLFSWHTCLLGVASCLLMMFLISPGAAGGSLLLMGLLAALLTARGGPSSWGYVSQALLFHQVRKYLLRLDVRKDHVKFWRPQLLLLVGNPRGALPLLRLANQLKKGGLYVLGHVTLGDLDSLPSDPVQPQYGAWLSLVDRAQVKAFVDLTLSPSVRQGAQHLLRISGLGGMKPNTLVLGFYDDAPPQDHFLTDPAFSEPADSTREGSSPALSTLFPPPRAPGSPRALNPQDYVATVADALKMNKNVVLARASGALPPERLSRGSGGTSQLHHVDVWPLNLLRPRGGPGYVDVCGLFLLQMATILGMVPAWHSARLRIFLCLGPREAPGAAEGRLRALLSQLRIRAEVQEVVWGEGAGAGEPEAEEEGDFVNSGRGDAEAEALARSANALVRAQQGRGTGGGPGGPEGGDAEGPITALTFLYLPRPPADPARYPRYLALLETLTRDLGPTLLVHGVTPVTCTDL

SEQ ID NO: 20218 - protein, 22 aa, Artificial Sequence
  Synthetic polypeptide
PGPCCRKTMGSSAPSACGPHWC

SEQ ID NO: 20219 - protein, 57 aa, Artificial Sequence
  Synthetic polypeptide
SQHFGRLRQEDRWSPGVPDQPGQQSKSLPPNTKISQDPAAGRLWVLPRHQPVAPTGV

SEQ ID NO: 20220 - protein, 85 aa, Artificial Sequence
  Synthetic polypeptide
SQHFGRLRQEDRWSPGVPDQPGQQSKSLPPNTKISQDPAAGRLWVLPRHQPVAPTGVDRNLCHSALSVHELAHWCLPHPPCPGPG

SEQ ID NO: 20221 - protein, 101 aa, Artificial Sequence
  Synthetic polypeptide
DQEFKTSLANMGQPGLLAAGGAAAGRDGAALQLLPATGAPAVPRGQAGHAGPRAADPTHRGDNQHRVSPGRGHEPAQALPGAGAGQGLPGPALPAGAESHQ

SEQ ID NO: 20222 - protein, 543 aa, Artificial Sequence
  Synthetic polypeptide
RVRWLMPVISALGWPRRVDHEIRSSRPAWPTWGNLGSLQLEVRLRDETVLPSSYYQPLVHLLCHEVKLGMQGPGQLIPLIEETTSTECRQDVATNLLKLFLGQGLAKDFLDLLFQLELSRTSETNTLFRSNSLASKSVESFLKVAGMQYLHGVLGPIINKVFEEKKYVELDPSKVEVKDVGCSGLHRPQTEAEVLEQSAQTLRAHLGALLSALSRSVRACPAVVRATFRQLFRRVRERFPGAQHENVPFIAVTSFLCLRFFSPAIMSPKLFHLRERHADARTSRTLLLLAKAVQNVGNMDTPASRAKEAWMEPLQPTVHQGVAQLKDFITKLVDIEEKDELDLQRTLSLQAPPVKEGPLFIHRTKGKGPLMSSSFKKLYFSLTTEALSFAKTPSSKCVNELNQWLSALRKVSINNTGLLGSYHPGVFRGDKWSCCHQKEKTGQGCDKTRSRVTLQEWNDPLDHDLEAQLIYRHLLGVEAMLWERHRELSGGAEAGTVPTSPGKVPEDSLARLLRVLQDLREAHSSSPAGSPPSEPNCLLELQT

SEQ ID NO: 20223 - protein, 589 aa, Artificial Sequence
  Synthetic polypeptide
RVRWLMPVISALGWPRRVDHEIRSSRPAWPTWGNLGSLQLEVRLRDETVLPSSYYQPLVHLLCHEVKLGMQGPGQLIPLIEETTSTECRQDVATNLLKLFLGQGLAKDFLDLLFQLELSRTSETNTLFRSNSLASKSVESFLKVAGMQYLHGVLGPIINKVFEEKKYVELDPSKVEVKDVGCSGLHRPQTEAEVLEQSAQTLRAHLGALLSALSRSVRACPAVVRATFRQLFRRVRERFPGAQHENVPFIAVTSFLCLRFFSPAIMSPKLFHLRERHADARTSRTLLLLAKAVQNVGNMDTPASRAKEAWMEPLQPTVHQGVAQLKDFITKLVDIEEKDELDLQRTLSLQAPPVKEGPLFIHRTKGKGPLMSSSFKKLYFSLTTEALSFAKTPSSKKSALIKLANIRAAEKVEEKSFGGSHVMQVIYTDDAGRPQTAYLQCKCVNELNQWLSALRKVSINNTGLLGSYHPGVFRGDKWSCCHQKEKTGQGCDKTRSRVTLQEWNDPLDHDLEAQLIYRHLLGVEAMLWERHRELSGGAEAGTVPTSPGKVPEDSLARLLRVLQDLREAHSSSPAGSPPSEPNCLLELQT

SEQ ID NO: 20224 - protein, 67 aa, Artificial Sequence
  Synthetic polypeptide
SQHLGGRGGWIMRSGVQDQPGQHGATWAPCSWRCGCGTRRCCPPATTSHWCTCCATRSSWACRAQGS

SEQ ID NO: 20225 - protein, 90 aa, Artificial Sequence
  Synthetic polypeptide
DQEFKTSLANMGQPGLLAAGGAAAGRDGAALQLLPATGAPAVPRGQAGHAGPRAADPTHRGDNQHRVSPGRGHEPAQALPGAGAGQGLPG

SEQ ID NO: 20226 - protein, 101 aa, Artificial Sequence; identical to SEQ ID NO: 20221
  Synthetic polypeptide

SEQ ID NO: 20227 - protein, 76 aa, Artificial Sequence
  Synthetic polypeptide
PGAVAHACNLSTLGGRGGWIMRSGVQDQPGQHGATWAPCSWRCGCGTRRCCPPATTSHWCTCCATRSSWACRAQGS

SEQ ID NO: 20228 - protein, 103 aa, Artificial Sequence
  Synthetic polypeptide
SQHFGWPRRVDHEIRSSRPAWPTWGNLGSLQLEVRLRDETVLPSSYYQPLVHLLCHEVKLGMQGPGQLIPLIEETTSTECRQDVATNLLKLFLGQGLAKDFLD

SEQ ID NO: 20229 - protein, 535 aa, Artificial Sequence
  Synthetic polypeptide
SQHFGWPRRVDHEIRSSRPAWPTWGNLGSLQLEVRLRDETVLPSSYYQPLVHLLCHEVKLGMQGPGQLIPLIEETTSTECRQDVATNLLKLFLGQGLAKDFLDLLFQLELSRTSETNTLFRSNSLASKSMESFLKVAGMQYLHGVLGPIINKVFEEKKYVELDPSKVEVKDVGCSGLHRPQTEAEVLEQSAQTLRAHLGALLSALSRSVRACPAVVRATFRQLFRRVRERFPGAQHENVPFIAVTSFLCLRFFSPAIMSPKLFHLRERHADARTSRTLLLLAKAVQNVGNMDTPASRAKEAWMEPLQPTVRQGVAQLKDFITKLVDIEEKDELDLQRTLSLQAPPVKEGPLFIHRTKGKGPLMSSSFKKLYFSLTTEALSFAKTPSSKCVNELNQWLSALRKVSINNTGLLGSYHPGVFRGDKWSCCHQKEKTGQGCDKTRSRVTLQEWNDPLDHDLEAQLIYRHLLGVEAMLWERHRELSGGAEAGTVPTSPGKVPEDSLARLLRVLQDLREAHSSSPAGSPPSEPNCLLELQT

SEQ ID NO: 20230 - protein, 581 aa, Artificial Sequence
  Synthetic polypeptide
SQHFGWPRRVDHEIRSSRPAWPTWGNLGSLQLEVRLRDETVLPSSYYQPLVHLLCHEVKLGMQGPGQLIPLIEETTSTECRQDVATNLLKLFLGQGLAKDFLDLLFQLELSRTSETNTLFRSNSLASKSMESFLKVAGMQYLHGVLGPIINKVFEEKKYVELDPSKVEVKDVGCSGLHRPQTEAEVLEQSAQTLRAHLGALLSALSRSVRACPAVVRATFRQLFRRVRERFPGAQHENVPFIAVTSFLCLRFFSPAIMSPKLFHLRERHADARTSRTLLLLAKAVQNVGNMDTPASRAKEAWMEPLQPTVRQGVAQLKDFITKLVDIEEKDELDLQRTLSLQAPPVKEGPLFIHRTKGKGPLMSSSFKKLYFSLTTEALSFAKTPSSKKSALIKLANIRAAEKVEEKSFGGSHVMQVIYTDDAGRPQTAYLQCKCVNELNQWLSALRKVSINNTGLLGSYHPGVFRGDKWSCCHQKEKTGQGCDKTRSRVTLQEWNDPLDHDLEAQLIYRHLLGVEAMLWERHRELSGGAEAGTVPTSPGKVPEDSLARLLRVLQDLREAHSSSPAGSPPSEPNCLLELQT

SEQ ID NO: 20231 - protein, 22 aa, Artificial Sequence
  Synthetic polypeptide
GQEFKTSLTTMGSGPKGPQWHI

SEQ ID NO: 20232 - protein, 617 aa, Artificial Sequence
  Synthetic polypeptide
PPWDLAPKDRNGTSDPFVRVRYKGRTRETSIVKKSCYPRWNETFEFELQEGAMEALCVEAWDWDLVSRNDFLGKVVIDVQRLRVVQQEEGWFRLQPDQSKSRRHDEGNLGSLQLEVRLRDETVLPSSYYQPLVHLLCHEVKLGMQGPGQLIPLIEETTSTECRQDVATNLLKLFLGQGLAKDFLDLLFQLELSRTSETNTLFRSNSLASKSVESFLKVAGMQYLHGVLGPIINKVFEEKKYVELDPSKVEVKDVGCSGLHRPQTEAEVLEQSAQTLRAHLGALLSALSRSVRACPAVVRATFRQLFRRVRERFPGAQHENVPFIAVTSFLCLRFFSPAIMSPKLFHLRERHADARTSRTLLLLAKAVQNVGNMDTPASRAKEAWMEPLQPTVHQGVAQLKDFITKLVDIEEKDELDLQRTLSLQAPPVKEGPLFIHRTKGKGPLMSSSFKKLYFSLTTEALSFAKTPSSKCVNELNQWLSALRKVSINNTGLLGSYHPGVFRGDKWSCCHQKEKTGQGCDKTRSRVTLQEWNDPLDHDLEAQLIYRHLLGVEAMLWERHRELSGGAEAGTVPTSPGKVPEDSLARLLRVLQDLREAHSSSPAGSPPSEPNCLLELQT

SEQ ID NO: 20233 - protein, 663 aa, Artificial Sequence
  Synthetic polypeptide
PPWDLAPKDRNGTSDPFVRVRYKGRTRETSIVKKSCYPRWNETFEFELQEGAMEALCVEAWDWDLVSRNDFLGKVVIDVQRLRVVQQEEGWFRLQPDQSKSRRHDEGNLGSLQLEVRLRDETVLPSSYYQPLVHLLCHEVKLGMQGPGQLIPLIEETTSTECRQDVATNLLKLFLGQGLAKDFLDLLFQLELSRTSETNTLFRSNSLASKSVESFLKVAGMQYLHGVLGPIINKVFEEKKYVELDPSKVEVKDVGCSGLHRPQTEAEVLEQSAQTLRAHLGALLSALSRSVRACPAVVRATFRQLFRRVRERFPGAQHENVPFIAVTSFLCLRFFSPAIMSPKLFHLRERHADARTSRTLLLLAKAVQNVGNMDTPASRAKEAWMEPLQPTVHQGVAQLKDFITKLVDIEEKDELDLQRTLSLQAPPVKEGPLFIHRTKGKGPLMSSSFKKLYFSLTTEALSFAKTPSSKKSALIKLANIRAAEKVEEKSFGGSHVMQVIYTDDAGRPQTAYLQCKCVNELNQWLSALRKVSINNTGLLGSYHPGVFRGDKWSCCHQKEKTGQGCDKTRSRVTLQEWNDPLDHDLEAQLIYRHLLGVEAMLWERHRELSGGAEAGTVPTSPGKVPEDSLARLLRVLQDLREAHSSSPAGSPPSEPNCLLELQT

SEQ ID NO: 20234 - protein, 53 aa, Artificial Sequence
  Synthetic polypeptide
SQHFGRPRQVVHLRPGVQDQPDHHGIWPQRTAMAHLTPSSECATRAGHGRPRS

SEQ ID NO: 20235 - protein, 25 aa, Artificial Sequence
  Synthetic polypeptide
EQLWSAAPFEINTEGRNGNWHFSWV

SEQ ID NO: 20236 - protein, 23 aa, Artificial Sequence
  Synthetic polypeptide
GWQDGRIGTALVCSSLRDQHRRS

SEQ ID NO: 20237 - protein, 60 aa, Artificial Sequence
  Synthetic polypeptide
MARWPNRNSSGLQLPSRSTQKVVMGTGISAGFNLKESYNVDVVGTLPLGFHTEMTRRWRP

SEQ ID NO: 20238 - protein, 241 aa, Artificial Sequence
  Synthetic polypeptide
MARWPNRNSSGLQLPSRSTQKVVMGTGISAGFNLKESYNVDVVGTLPLGLLPPANPDTSLFHLVYVDAIAIAIVGFSVTISMAKTLANKHGYQVDGNQELIALGLCNSIGSLFQTFSISCSLSRSLVQEGTGGKTQLAGCLASLMILLVILATGFLFESLPQAVLSAIVIVNLKGMFMQFSDLPFFWRTSKIELTIWLTTFVSSLFLGLDYGLITAVIIALLTVIYRTQSFHTEMTRRWRP

SEQ ID NO: 20239 - protein, 410 aa, Artificial Sequence
  Synthetic polypeptide
MARWPNRNSSGLQLPSRSTQKVVMGTGISAGFNLKESYNVDVVGTLPLGLLPPANPDTSLFHLVYVDAIAIAIVGFSVTISMAKTLANKHGYQVDGNQELIALGLCNSIGSLFQTFSISCSLSRSLVQEGTGGKTQLAGCLASLMILLVILATGFLFESLPQAVLSAIVIVNLKGMFMQFSDLPFFWRTSKIELTIWLTTFVSSLFLGLDYGLITAVIIALLTVIYRTQSPSYKVLGKLPETDVYIDIDAYEEVKEIPGIKIFQINAPIYYANSDLYSNALKRKTGVNPAVIMGARRKAMRKYAKEVGNANMANATVVKADAEVDGEDATKPEEEDGEVKYPPIVIKSTFPEEMQRFMPPGDNVHTVILDFTQVNFIDSVGVKTLAGIVKEYGDVGIYVYLAGCSAFIQR

SEQ ID NO: 20240 - protein, 469 aa, Artificial Sequence
  Synthetic polypeptide
MARWPNRNSSGLQLPSRSTQKVVMGTGISAGFNLKESYNVDVVGTLPLGLLPPANPDTSLFHLVYVDAIAIAIVGFSVTISMAKTLANKHGYQVDGNQELIALGLCNSIGSLFQTFSISCSLSRSLVQEGTGGKTQLAGCLASLMILLVILATGFLFESLPQAVLSAIVIVNLKGMFMQFSDLPFFWRTSKIELTIWLTTFVSSLFLGLDYGLITAVIIALLTVIYRTQSPSYKVLGKLPETDVYIDIDAYEEVKEIPGIKIFQINAPIYYANSDLYSNALKRKTGVNPAVIMGARRKAMRKYAKEVGNANMANATVVKADAEVDGEDATKPEEEDGEVKYPPIVIKSTFPEEMQRFMPPGDNVHTVILDFTQVNFIDSVGVKTLAGIVKEYGDVGIYVYLAGCSAQVVNDLTRNRFFENPALWELLFHSIHDAVLGSQLREALAEQEASAPPSQEDLEPNATPATPEA

SEQ ID NO: 20241 - protein, 471 aa, Artificial Sequence
  Synthetic polypeptide
MARWPNRNSSGLQLPSRSTQKVVMGTGISAGFNLKESYNVDVVGTLPLGLLPPANPDTSLFHLVYVDAIAIAIVGFSVTISMAKTLANKHGYQVDGNQELIALGLCNSIGSLFQTFSISCSLSRSLVQEGTGGKTQLAGCLASLMILLVILATGFLFESLPQAVLSAIVIVNLKGMFMQFSDLPFFWRTSKIELTIWLTTFVSSLFLGLDYGLITAVIIALLTVIYRTQSPSYKVLGKLPETDVYIDIDAYEEVKEIPGIKIFQINAPIYYANSDLYSNALKRKTGVNPAVIMGARRKAMRKYAKEVGNANMANATVVKATQDAEVDGEDATKPEEEDGEVKYPPIVIKSTFPEEMQRFMPPGDNVHTVILDFTQVNFIDSVGVKTLAGIVKEYGDVGIYVYLAGCSAQVVNDLTRNRFFENPALWELLFHSIHDAVLGSQLREALAEQEASAPPSQEDLEPNATPATPEA

SEQ ID NO: 20242 - protein, 198 aa, Artificial Sequence
  Synthetic polypeptide
MARWPNRNSSGLQLPSRSTQKVVMGTGISAGFNLKESYNVDVVGTLPLGLLPPANPDTSLFHLVYVDAIAIAIVGFSVTISMAKTLANKHGYQVDGNQELIALGLCNSIGSLFQTFSISCSLSRSLVQEGTGGKTQLAGCLASLMILLVILATGFLFESLPQTIWLTTFVSSLFLGLDYGLITAVIIALLTVIYRTQR

SEQ ID NO: 20243 - protein, 437 aa, Artificial Sequence
  Synthetic polypeptide
MARWPNRNSSGLQLPSRSTQKVVMGTGISAGFNLKESYNVDVVGTLPLGLLPPANPDTSLFHLVYVDAIAIAIVGFSVTISMAKTLANKHGYQVDGNQELIALGLCNSIGSLFQTFSISCSLSRSLVQEGTGGKTQLAGCLASLMILLVILATGFLFESLPQTIWLTTFVSSLFLGLDYGLITAVIIALLTVIYRTQSPSYKVLGKLPETDVYIDIDAYEEVKEIPGIKIFQINAPIYYANSDLYSNALKRKTGVNPAVIMGARRKAMRKYAKEVGNANMANATVVKADAEVDGEDATKPEEEDGEVKYPPIVIKSTFPEEMQRFMPPGDNVHTVILDFTQVNFIDSVGVKTLAGIVKEYGDVGIYVYLAGCSAQVVNDLTRNRFFENPALWELLFHSIHDAVLGSQLREALAEQEASAPPSQEDLEPNATPATPEA

SEQ ID NO: 20244 - protein, 439 aa, Artificial Sequence
  Synthetic polypeptide
MARWPNRNSSGLQLPSRSTQKVVMGTGISAGFNLKESYNVDVVGTLPLGLLPPANPDTSLFHLVYVDAIAIAIVGFSVTISMAKTLANKHGYQVDGNQELIALGLCNSIGSLFQTFSISCSLSRSLVQEGTGGKTQLAGCLASLMILLVILATGFLFESLPQTIWLTTFVSSLFLGLDYGLITAVIIALLTVIYRTQSPSYKVLGKLPETDVYIDIDAYEEVKEIPGIKIFQINAPIYYANSDLYSNALKRKTGVNPAVIMGARRKAMRKYAKEVGNANMANATVVKATQDAEVDGEDATKPEEEDGEVKYPPIVIKSTFPEEMQRFMPPGDNVHTVILDFTQVNFIDSVGVKTLAGIVKEYGDVGIYVYLAGCSAQVVNDLTRNRFFENPALWELLFHSIHDAVLGSQLREALAEQEASAPPSQEDLEPNATPATPEA

SEQ ID NO: 20245 - protein, 172 aa, Artificial Sequence
  Synthetic polypeptide
MARWPNRNSSGLQLPSRSTQKVVMGTGISAGFNLKESYNVDVVGTLPLGLLPPANPDTSLFHLVYVDAIAIAIVGFSVTISMAKTLANKHGYQVDGNQELIALGLCNSIGSLFQTFSISCSLSRSLVQEGTGGKTQTIWLTTFVSSLFLGLDYGLITAVIIALLTVIYRTQR

SEQ ID NO: 20246 - protein, 20 aa, Artificial Sequence
  Synthetic polypeptide
DLGSNPGSNTHQLCDLEFLY

SEQ ID NO: 20247 - protein, 21 aa, Artificial Sequence
  Synthetic polypeptide
VRIPAPTLTSCVTLSFSIRIP

SEQ ID NO: 20248 - protein, 19 aa, Artificial Sequence
  Synthetic polypeptide
VRIPAPTLTSCVTLSEFLY

SEQ ID NO: 20249 - protein, 8 aa, Artificial Sequence
  Synthetic polypeptide
VSFSIRIP

SEQ ID NO: 20250 - protein, 143 aa, Artificial Sequence
  Synthetic polypeptide
CLAQSLAYGGGEALHLILLPATGNVAENSPPGTSVHKFSVKLSASLSPVIPGFPQIVNSNPLTEAFRVNWLSGTYFEVVTTGMEQLDFETGPNIFDLQIYVKDEVGVTDLQVLTVQVTDVNEPPQFQGNLAEARHECTQSWRN

SEQ ID NO: 20251 - protein, 879 aa, Artificial Sequence
  Synthetic polypeptide
CLAQSLAYGGGEALHLILLPATGNVAENSPPGTSVHKFSVKLSASLSPVIPGFPQIVNSNPLTEAFRVNWLSGTYFEVVTTGMEQLDFETGPNIFDLQIYVKDEVGVTDLQVLTVQVTDVNEPPQFQGNLAEGLHLYIVERANPGFIYQVEAFDPEDTSRNIPLSYFLISPPKSFRMSANGTLFSTTELDFEAGHRSFHLIVEVRDSGGLKASTELQVNIVNLNDEVPRFTSPTRVYTVLEELSPGTIVANITAEDPDDEGFPSHLLYSITTVSKYFMINQLTGTIQVAQRIDRDAGELRQNPTISLEVLVKDRPYGGQENRIQITFIVEDVNDNPATCQKFTFSIMVPERTAKGTLLLDLNKFCFDDDSEAPNNRFNFTMPSGVGSGSRFLQDPAGSGKIVLIGDLDYENPSNLAAGNKYTVIIQVQDVAPPYYKNNVYVYILTSPENEFPLIFDRPSYVFDVSERRPARTRVGQVRATDKDLPQSSLLYSISTGGASLQYPNVFWINPKTGELQLVTKVDCETTPIYILRIQATNNEDTSSVTVTVNILEENDEKPICTPNSYFLALPVDLKVGTNIQNFKLTCTDLDSSPRSFRYSIGPGNVNNHFTFSPNAGSNVTRLLLTSRFDYAGGFDKIWDYKLLVYVTDDNLMSDRKKAEALVETGTVTLSIKVIPHPTTIITTTPRPRVTYQVLRKNVYSPSAWYVPFVITLGSILLLGLLVYLVVLLAKAIHRHCPCKTGKNKEPLKKKTETKTAERDVVVETIQMNTIFDGEAIDPVTGETYEFNSKTGARKWKDPLTQMPKWKESSHQGAAPRRVTAGEGMGSLRSANWEEDELSGKAWAEDAGLGSRNEGGKLGNPKNRNPAFMNRAYPKPHPGK

SEQ ID NO: 20252 - protein, 879 aa, Artificial Sequence
  Synthetic polypeptide
CLAQSLAYGGGEALHLILLPATGNVAENSPPGTSVHKFSVKLSASLSPVIPGFPQIVNSNPLTEAFRVNWLSGTYFEVVTTGMEQLDFETGPNIFDLQIYVKDEVGVTDLQVLTVQVTDVNEPPQFQGNLAEGLHLYIVERANPGFIYQVEAFDPEDTSRNIPLSYFLISPPKSFRMSANGTLFSTTELDFEAGHRSFHLIVEVRDSGGLKASTELQVNIVNLNDEVPRFTSPTRVYTVLEELSPGTIVANITAEDPDDEGFPSHLLYSITTVSKYFMINQLTGTIQVAQRIDRDAGELRQNPTISLEVLVKDRPYGGQENRIQITFIVEDVNDNPATCQKFTFSIMVPERTAKGTLLLDLNKFCFDDDSEAPNNRFNFTMPSGVGSGSRFLQDPAGSGKIVLIGDLDYENPSNLAAGNKYTVIIQVQDVAPPYYKNNVYVYILTSPENEFPLIFDRPSYVFDVSERRPARTRVGQVRATDKDLPQSSLLYSISTGGASLQYPNVFWINPKTGELQLVTKVDCETTPIYILRIQATNNEDTSSVTVTVNILEENDEKPICTPNSYFLALPVDLKVGTNIQNFKLTCTDLDSSPRSFRYSIGPGNVNNHFTFSPNAGSNVTRLLLTSRFDYAGGFDKIWDYKLLVYVTDDNLMSDRKKAEALVETGTVTLSIKVIPHPTTIITTTPRPRVTYQVLRKNVYSPSAWYVPFVITLGSILLLGLLVYLVVLLAKAIHRHCPCKTGKNKEPLTKKGETKTAERDVVVETIQMNTIFDGEAIDPVTGETYEFNSKTGARKWKDPLTQMPKWKESSHQGAAPRRVTAGEGMGSLRSANWEEDELSGKAWAEDAGLGSRNEGGKLGNPKNRNPAFMNRAYPKPHPGK

SEQ ID NO: 20253 - protein, 13 aa, Artificial Sequence
  Synthetic polypeptide
HRAWHMEGEKHYT

SEQ ID NO: 20254 - protein, 86 aa, Artificial Sequence
  Synthetic polypeptide
IYLLVSSLDCEIHESPENILGSLVLSTELGIWRGRSTTPNPLTCYRQCGREFSTWDFSAQVFCEVISIIVTCDPRISPDSQLKSPH

SEQ ID NO: 20255 - protein, 308 aa, Artificial Sequence
  Synthetic polypeptide
EPKSVCAEAYNPDEEEDDAESRIIHPKTDDQRNRLQEACKDILLFKNLDPEQMSQVLDAMFEKLVKDGEHVIDQGDDGDNFYVIDRGTFDIYVKCDGVGRCVGNYDNRGSFGELALMYNTPRAATITATSPGALWGLDRVTFRRIIVKNNAKKRKMYESFIESLPFLKSLEFSERLKVVDVIGTKVYNDGEQIIAQGDSADSFFIVESGEVKITMKRKGKSEVEENGAVEIARCSRGQYFGELALVTNKPRAASAHAIGTVKCLAMDVQAFERLLGPCMEIMKRNIATYEEQLVALFGTNMDIVEPTA

SEQ ID NO: 20256 - protein, 37 aa, Artificial Sequence
  Synthetic polypeptide
IEASTSCSSPTPRKDIIEQLSKRNTFIRTKISMCRSL

SEQ ID NO: 20257 - protein, 66 aa, Artificial Sequence
  Synthetic polypeptide
TTIQKKHLHKNQNQYVQKLIILMKKKMMQSPGLYIQKLMIKEIGCKRLAKTSCCLRIWIRSRCLKY

SEQ ID NO: 20258 - protein, 25 aa, Artificial Sequence
  Synthetic polypeptide
HIRNYILPSSKRGSLLLVSCPYYDK

SEQ ID NO: 20259 - protein, 1043 aa, Artificial Sequence
  Synthetic polypeptide
LGASHLAHQKLHFTFFKKGEFVACLLSLLRQMTDRHYQQLLDSFNTKEELRDFLLQIFTVFRILIRPEMFPKDWTVMRLVANNVIITTVLYLSDALRKNFLNENFDYKIWDSYFYLAVIFINQLCLQLEMFTPSKKKKVLEKYGDMRVTMGCEIFSMWQNLGEHKLHFIPALIGPFLEVTLIPQPDLRNVMIPIFHDMMDWEQRRSGNFKQVEAKLIDKLDSLMSEGKGDETYRELFNSIIPLFGPYPSLLKKIERETWRESGVSLIATVTRLMERLLDYRDCMKMGEVDGKKIGCTVSLLNFYKTELNKEEMYIRYIHKLYDLHLKAQNFTEAAYTLLLYDELLEWSDRPLREFLTYPMQTEWQRKEHLHLTIIQNFDRGKCWENGIILCRKIAEQYESYYDYRNLSKMRMMEASLYDKIMDQQRLEPEFFRVGFYGKKFPFFLRNKEFVCRGHDYERLEAFQQRMLNEFPHAIAMQHANQPDETIFQAEAQYLQIYAVTPIPESQEVLQREGVPDNIKSFYKVNHIWKFRYDRPFHKGTKDKENEFKSLWVERTSLYLVQSLPGISRWFEVEKREVVEMSPLENAIEVLENKNQQLKTLISQCQTRQMQNINPLTMCLNGVIDAAVNGGVSRYQEAFFVKEYILSHPEDGEKIARLRELMLEQAQILEFGLAVHEKFVPQDMRPLHKKLVDQFFVMKSSLGIQEFSACMQASPVHFPNGSPRVCRNSAPASVSPDGTRVIPRRSPLSYPAVNRYSSSSLSSQASAEVSNITGQSESSDEVFNMQPSPSTSSLSSTHSASPNVTSSAPSSARASPLLSDKHKHSRENSCLSPRERPCSAIYPTPVEPSQRMLFNHIGDGALPRSDPNLSAPEKASPARHTTSVSPSPAGRSPLKGSVQSFTPSPVEYHSPGLISNSPVLSGSYSSGISSLSRCSTSETSGFENQVNEQSAPLPVPVPVPVPSYGGEEPVRKESKTPPPYSVYERTLRRPVPLPHSLSIPVTSEPPALPPKPLAARSSHLENGARRTDPGPRPRPLPRKVSQL

SEQ ID NO: 20260 - protein, 1081 aa, Artificial Sequence
  Synthetic polypeptide
LGASHLAHQKLHFTFFKKGEFVACLLSLLRQMTDRHYQQLLDSFNTKEELRDFLLQIFTVFRILIRPEMFPKDWTVMRLVANNVIITTVLYLSDALRKNFLNENFDYKIWDSYFYLAVIFINQLCLQLEMFTPSKKKKVLEKYGDMRVTMGCEIFSMWQNLGEHKLHFIPALIGPFLEVTLIPQPDLRNVMIPIFHDMMDWEQRRSGNFKQVEAKLIDKLDSLMSEGKGDETYRELFNSIIPLFGPYPSLLKKIERETWRESGVSLIATVTRLMERLLDYRDCMKMGEVDGKKIGCTVSLLNFYKTELNKEEMYIRYIHKLYDLHLKAQNFTEAAYTLLLYDELLEWSDRPLREFLTYPMQTEWQRKEHLHLTIIQNFDRGKCWENGIILCRKIAEQYESYYDYRNLSKMRMMEASLYDKIMDQQRLEPEFFRVGFYGKKFPFFLRNKEFVCRGHDYERLEAFQQRMLNEFPHAIAMQHANQPDETIFQAEAQYLQIYAVTPIPESQEVLQREGVPDNIKSFYKVNHIWKFRYDRPFHKGTKDKENEFKSLWVERTSLYLVQSLPGISRWFEVEKREVVEMSPLENAIEVLENKNQQLKTLISQCQTRQMQNINPLTMCLNGVIDAAVNGGVSRYQEAFFVKEYILSHPEDGEKIARLRELMLEQAQILEFGLAVHEKFVPQDMRPLHKKLVDQFFVMKSSLGIQEFSACMQASPVHFPNGSPRVCRNSAPASVSPDGTRVIPRRSPLSYPAVNRYSSSSLSSQASAEVSNITGQSESSDEVFNMQPSPSTSSLSSTHSASPNVTSSAPSSARASPLLSDKHKHSRENSCLSPRERPCSAIYPTPVEPSQRMLFNHIGDGALPRSDPNLSAPEKAVNPTPSSWSLDSGKEAKNMSDSGKLISPPVPPRPTQTASPARHTTSVSPSPAGRSPLKGSVQSFTPSPVEYHSPGLISNSPVLSGSYSSGISSLSRCSTSETSGFENQVNEQSAPLPVPVPVPVPSYGGEEPVRKESKTPPPYSVYERTLRRPVPLPHSLSIPVTSEPPALPPKPLAARSSHLENGARRTDPGPRPRPLPRKVSQL

SEQ ID NO: 20261 - protein, 1072 aa, Artificial Sequence
  Synthetic polypeptide
LGASHLAHQKLHFTFFKKGEFVACLLSLLRQMTDRHYQQLLDSFNTKEELRDFLLQIFTVFRILIRPEMFPKDWTVMRLVANNVIITTVLYLSDALRKNFLNENFDYKIWDSYFYLAVIFINQLCLQLEMFTPSKKKKVLEKYGDMRVTMGCEIFSMWQNLGEHKLHFIPALIGPFLEVTLIPQPDLRNVMIPIFHDMMDWEQRRSGNFKQVEAKLIDKLDSLMSEGKGDETYRELFNSILLKKIERETWRESGVSLIATVTRLMERLLDYRDCMKMGEVDGKKIGCTVSLLNFYKTELNKEEMYIRYIHKLYDLHLKAQNFTEAAYTLLLYDELLEWSDRPLREFLTYPMQTEWQRKEHLHLTIIQNFDRGKCWENGIILCRKIAEQYESYYDYRNLSKMRMMEASLYDKIMDQQRLEPEFFRVGFYGKKFPFFLRNKEFVCRGHDYERLEAFQQRMLNEFPHAIAMQHANQPDETIFQAEAQYLQIYAVTPIPESQEVLQREGVPDNIKSFYKVNHIWKFRYDRPFHKGTKDKENEFKSLWVERTSLYLVQSLPGISRWFEVEKREVVEMSPLENAIEVLENKNQQLKTLISQCQTRQMQNINPLTMCLNGVIDAAVNGGVSRYQEAFFVKEYILSHPEDGEKIARLRELMLEQAQILEFGLAVHEKFVPQDMRPLHKKLVDQFFVMKSSLGIQEFSACMQASPVHFPNGSPRVCRNSAPASVSPDGTRVIPRRSPLSYPAVNRYSSSSLSSQASAEVSNITGQSESSDEVFNMQPSPSTSSLSSTHSASPNVTSSAPSSARASPLLSDKHKHSRENSCLSPRERPCSAIYPTPVEPSQRMLFNHIGDGALPRSDPNLSAPEKAVNPTPSSWSLDSGKEAKNMSDSGKLISPPVPPRPTQTASPARHTTSVSPSPAGRSPLKGSVQSFTPSPVEYHSPGLISNSPVLSGSYSSGISSLSRCSTSETSGFENQVNEQSAPLPVPVPVPVPSYGGEEPVRKESKTPPPYSVYERTLRRPVPLPHSLSIPVTSEPPALPPKPLAARSSHLENGARRTDPGPRPRPLPRKVSQL

SEQ ID NO: 20262 - protein, 35 aa, Artificial Sequence
  Synthetic polypeptide
VTWGKSFSTSETTFYLLQKGGVCCLSPVPITTNDR

SEQ ID NO: 20263 - protein, 1965 aa, Artificial Sequence
  Synthetic polypeptide
GEVIASFRGTVPYGLSLEIGDTVQILEKCDGWYRGFALKNPNIKGIFPSSYVHLKNACVKNKGQFEMVIPTEDSVITEMTSTLRDWGTMWKQLYVRNEGDLFHRLWHIMNEILDLRRQVLVGHLTHDRMKDVKRHITARLDWGNEQLGLDLVPRKEYAMVDPEDISITELYRLMEHRHRKKDTPVQASSHHLFVQMKSLMCSNLGEELEVIFSLFDSKENRPISERFFLRLNRNGLPKAPDKPERHCSLFVDLGSSELRKDIYITVHIIRIGRMGAGEKKNACSVQYRRPFGCAVLSIADLLTGETKDDLILKVYMCNTESEWYQIHENIIKKLNARYNLTGSNAGLAVSLQLLHGDIEQIRREYSSVFSHGVSITRKLGFSNIIMPGEMRNDLYITIERGEFEKGGKSVARNVEVTMFIVDSSGQTLKDFISFGSGEPPASEYHSFVLYHNNSPRWSELLKLPIPVDKFRGAHIRFEFRHCSTKEKGEKKLFGFSFVPLMQEDGRTLPDGTHELIVHKCEENTNLQDTTRYLKLPFSKGIFLGNNNQAMKATKESFCITSFLCSTKLTQNGDMLDLLKWRTHPDKITGCLSKLKEIDGSEIVKFLQDTLDTLFGILDENSQKYGSKVFDSLVHIINLLQDSKFHHFKPVMDTYIESHFAGALAYRDLIKVLKWYVDRITEAERQEHIQEVLKAQEYIFKYIVQSRRLFSLATGGQNEEEFRCCIQELLMSVRFFLSQESKGSGALSQSQAVFLSSFPAVYSELLKLFDVREVANLVQDTLGSLPTILHVDDSLQAIKLQCIGKTVESQLYTNPDSRYILLPVVLHHLHIHLQEQKDLIMCARILSNVFCLIKKNSSEKSVLEEIDVIVASLLDILLRTILEITSRPQPSSSAMRFQFQDVTGEFVACLLSLLRQMTDRHYQQLLDSFNTKEELRDFLLQIFTVFRILIRPEMFPKDWTVMRLVANNVIITTVLYLSDALRKNFLNENFDYKIWDSYFYLAVIFINQLCLQLEMFTPSKKKKVLEKYGDMRVTMGCEIFSMWQNLGEHKLHFIPALIGPFLEVTLIPQPDLRNVMIPIFHDMMDWEQRRSGNFKQVEAKLIDKLDSLMSEGKGDETYRELFNSIIPLFGPYPSLLKKIERETWRESGVSLIATVTRLMERLLDYRDCMKMGEVDGKKIGCTVSLLNFYKTELNKEEMYIRYIHKLYDLHLKAQNFTEAAYTLLLYDELLEWSDRPLREFLTYPMQTEWQRKEHLHLTIIQNFDRGKCWENGIILCRKIAEQYESYYDYRNLSKMRMMEASLYDKIMDQQRLEPEFFRVGFYGKKFPFFLRNKEFVCRGHDYERLEAFQQRMLNEFPHAIAMQHANQPDETIFQAEAQYLQIYAVTPIPESQEVLQREGVPDNIKSFYKVNHIWKFRYDRPFHKGTKDKENEFKSLWVERTSLYLVQSLPGISRWFEVEKREVVEMSPLENAIEVLENKNQQLKTLISQCQTRQMQNINPLTMCLNGVIDAAVNGGVSRYQEAFFVKEYILSHPEDGEKIARLRELMLEQAQILEFGLAVHEKFVPQDMRPLHKKLVDQFFVMKSSLGIQEFSACMQASPVHFPNGSPRVCRNSAPASVSPDGTRVIPRRSPLSYPAVNRYSSSSLSSQASAEVSNITGQSESSDEVFNMQPSPSTSSLSSTHSASPNVTSSAPSSARASPLLSDKHKHSRENSCLSPRERPCSAIYPTPVEPSQRMLFNHIGDGALPRSDPNLSAPEKAVNPTPSSWSLDSGKEAKNMSDSGKLISPPVPPRPTQTASPARHTTSVSPSPAGRSPLKGSVQSFTPSPVEYHSPGLISNSPVLSGSYSSGISSLSRCSTSETSGFENQVNEQSAPLPVPVPVPVPSYGGEEPVRKESKTPPPYSVYERTLRRPVPLPHSLSIPVTSEPPALPPKPLAARSSHLENGARRTDPGPRPRPLPRKVSQL

SEQ ID NO: 20264 - protein, 1956 aa, Artificial Sequence
  Synthetic polypeptide
GEVIASFRGTVPYGLSLEIGDTVQILEKCDGWYRGFALKNPNIKGIFPSSYVHLKNACVKNKGQFEMVIPTEDSVITEMTSTLRDWGTMWKQLYVRNEGDLFHRLWHIMNEILDLRRQVLVGHLTHDRMKDVKRHITARLDWGNEQLGLDLVPRKEYAMVDPEDISITELYRLMEHRHRKKDTPVQASSHHLFVQMKSLMCSNLGEELEVIFSLFDSKENRPISERFFLRLNRNGLPKAPDKPERHCSLFVDLGSSELRKDIYITVHIIRIGRMGAGEKKNACSVQYRRPFGCAVLSIADLLTGETKDDLILKVYMCNTESEWYQIHENIIKKLNARYNLTGSNAGLAVSLQLLHGDIEQIRREYSSVFSHGVSITRKLGFSNIIMPGEMRNDLYITIERGEFEKGGKSVARNVEVTMFIVDSSGQTLKDFISFGSGEPPASEYHSFVLYHNNSPRWSELLKLPIPVDKFRGAHIRFEFRHCSTKEKGEKKLFGFSFVPLMQEDGRTLPDGTHELIVHKCEENTNLQDTTRYLKLPFSKGIFLGNNNQAMKATKESFCITSFLCSTKLTQNGDMLDLLKWRTHPDKITGCLSKLKEIDGSEIVKFLQDTLDTLFGILDENSQKYGSKVFDSLVHIINLLQDSKFHHFKPVMDTYIESHFAGALAYRDLIKVLKWYVDRITEAERQEHIQEVLKAQEYIFKYIVQSRRLFSLATGGQNEEEFRCCIQELLMSVRFFLSQESKGSGALSQSQAVFLSSFPAVYSELLKLFDVREVANLVQDTLGSLPTILHVDDSLQAIKLQCIGKTVESQLYTNPDSRYILLPVVLHHLHIHLQEQKDLIMCARILSNVFCLIKKNSSEKSVLEEIDVIVASLLDILLRTILEITSRPQPSSSAMRFQFQDVTGEFVACLLSLLRQMTDRHYQQLLDSFNTKEELRDFLLQIFTVFRILIRPEMFPKDWTVMRLVANNVIITTVLYLSDALRKNFLNENFDYKIWDSYFYLAVIFINQLCLQLEMFTPSKKKKVLEKYGDMRVTMGCEIFSMWQNLGEHKLHFIPALIGPFLEVTLIPQPDLRNVMIPIFHDMMDWEQRRSGNFKQVEAKLIDKLDSLMSEGKGDETYRELFNSILLKKIERETWRESGVSLIATVTRLMERLLDYRDCMKMGEVDGKKIGCTVSLLNFYKTELNKEEMYIRYIHKLYDLHLKAQNFTEAAYTLLLYDELLEWSDRPLREFLTYPMQTEWQRKEHLHLTIIQNFDRGKCWENGIILCRKIAEQYESYYDYRNLSKMRMMEASLYDKIMDQQRLEPEFFRVGFYGKKFPFFLRNKEFVCRGHDYERLEAFQQRMLNEFPHAIAMQHANQPDETIFQAEAQYLQIYAVTPIPESQEVLQREGVPDNIKSFYKVNHIWKFRYDRPFHKGTKDKENEFKSLWVERTSLYLVQSLPGISRWFEVEKREVVEMSPLENAIEVLENKNQQLKTLISQCQTRQMQNINPLTMCLNGVIDAAVNGGVSRYQEAFFVKEYILSHPEDGEKIARLRELMLEQAQILEFGLAVHEKFVPQDMRPLHKKLVDQFFVMKSSLGIQEFSACMQASPVHFPNGSPRVCRNSAPASVSPDGTRVIPRRSPLSYPAVNRYSSSSLSSQASAEVSNITGQSESSDEVFNMQPSPSTSSLSSTHSASPNVTSSAPSSARASPLLSDKHKHSRENSCLSPRERPCSAIYPTPVEPSQRMLFNHIGDGALPRSDPNLSAPEKAVNPTPSSWSLDSGKEAKNMSDSGKLISPPVPPRPTQTASPARHTTSVSPSPAGRSPLKGSVQSFTPSPVEYHSPGLISNSPVLSGSYSSGISSLSRCSTSETSGFENQVNEQSAPLPVPVPVPVPSYGGEEPVRKESKTPPPYSVYERTLRRPVPLPHSLSIPVTSEPPALPPKPLAARSSHLENGARRTDPGPRPRPLPRKVSQL

SEQ ID NO: 20265 - protein, 2001 aa, Artificial Sequence
  Synthetic polypeptide
GEVIASFRGTVPYGLSLEIGDTVQILEKCDGWYRGFALKNPNIKGIFPSSYVHLKNACVKNKGQFEMVIPTEDSVITEMTSTLRDWGTMWKQLYVRNEGDLFHRLWHIMNEILDLRRQVLVGHLTHDRMKDVKRHITARLDWGNEQLGLDLVPRKEYAMVDPEDISITELYRLMEHRHRKKDTPVQASSHHLFVQMKSLMCSNLGEELEVIFSLFDSKENRPISERFFLRLNRNGLPKAPDKPERHCSLFVDLGSSELRKDIYITVHIIRIGRMGAGEKKNACSVQYRRPFGCAVLSIADLLTGETKDDLILKVYMCNTESEWYQIHENIIKKLNARYNLTGSNAGLAVSLQLLHGDIEQIRREYSSVFSHGVSITRKLGFSNIIMPGEMRNDLYITIERGEFEKGGKSVARNVEVTMFIVDSSGQTLKDFISFGSGEPPASEYHSFVLYHNNSPRWSELLKLPIPVDKFRGAHIRFEFRHCSTKEKGEKKLFGFSFVPLMQEDGRTLPDGTHELIVHKCEENTNLQDTTRYLKLPFSKGIFLGNNNQAMKATKESFCITSFLCSTKLTQNGDMLDLLKWRTHPDKITGCLSKLKEIDGSEIVKFLQDTLDTLFGILDENSQKYGSKVFDSLVHIINLLQDSKFHHFKPVMDTYIESHFAGALAYRDLIKVLKWYVDRITEAERQEHIQEVLKAQEYIFKYIVQSRRLFSLATGGQNEEEFRCCIQELLMSVRFFLSQESKGSGALSQSQAVFLSSFPAVYSELLKLFDVREVANLVQDTLGSLPTILHVDDSLQAIKLQCIGKTVESQLYTNPDSRYILLPVVLHHLHIHLQEQKDLIMCARILSNVFCLIKKNSSEKSVLEEIDVIVASLLDILLRTILEITSRPQPSSSAMRFQFQDVTRTGFLNRESSHGSTTLSTFSVCADTYGKVPMTSRHTGEFVACLLSLLRQMTDRHYQQLLDSFNTKEELRDFLLQIFTVFRILIRPEMFPKDWTVMRLVANNVIITTVLYLSDALRKNFLNENFDYKIWDSYFYLAVIFINQLCLQLEMFTPSKKKKVLEKYGDMRVTMGCEIFSMWQNLGEHKLHFIPALIGPFLEVTLIPQPDLRNVMIPIFHDMMDWEQRRSGNFKQVEAKLIDKLDSLMSEGKGDETYRELFNSIIPLFGPYPSLLKKIERETWRESGVSLIATVTRLMERLLDYRDCMKMGEVDGKKIGCTVSLLNFYKTELNKEEMYIRYIHKLYDLHLKAQNFTEAAYTLLLYDELLEWSDRPLREFLTYPMQTEWQRKEHLHLTIIQNFDRGKCWENGIILCRKIAEQYESYYDYRNLSKMRMMEASLYDKIMDQQRLEPEFFRVGFYGKKFPFFLRNKEFVCRGHDYERLEAFQQRMLNEFPHAIAMQHANQPDETIFQAEAQYLQIYAVTPIPESQEVLQREGVPDNIKSFYKVNHIWKFRYDRPFHKGTKDKENEFKSLWVERTSLYLVQSLPGISRWFEVEKREVVEMSPLENAIEVLENKNQQLKTLISQCQTRQMQNINPLTMCLNGVIDAAVNGGVSRYQEAFFVKEYILSHPEDGEKIARLRELMLEQAQILEFGLAVHEKFVPQDMRPLHKKLVDQFFVMKSSLGIQEFSACMQASPVHFPNGSPRVCRNSAPASVSPDGTRVIPRRSPLSYPAVNRYSSSSLSSQASAEVSNITGQSESSDEVFNMQPSPSTSSLSSTHSASPNVTSSAPSSARASPLLSDKHKHSRENSCLSPRERPCSAIYPTPVEPSQRMLFNHIGDGALPRSDPNLSAPEKAVNPTPSSWSLDSGKEAKNMSDSGKLISPPVPPRPTQTASPARHTTSVSPSPAGRSPLKGSVQSFTPSPVEYHSPGLISNSPVLSGSYSSGISSLSRCSTSETSGFENQVNEQSAPLPVPVPVPVPSYGGEEPVRKESKTPPPYSVYERTLRRPVPLPHSLSIPVTSEPPALPPKPLAARSSHLENGARRTDPGPRPRPLPRKVSQL

SEQ ID NO: 20266 - protein, 56 aa, Artificial Sequence
  Synthetic polypeptide
RNLCLIHCCIATALSFDSKEKLLPVSEEPFHMACHWKLEIQFRSWRSVMAGTEDLP

SEQ ID NO: 20267 - protein, 33 aa, Artificial Sequence
  Synthetic polypeptide
VLTVRRSYCQFPRNRSIWPVIGNWRYSSDPGEV

SEQ ID NO: 20268 - protein, 7 aa, Artificial Sequence
  Synthetic polypeptide
TPQSQWT

SEQ ID NO: 20269 - protein, 25 aa, Artificial Sequence
  Synthetic polypeptide
VSRGLHSHAELLKANGLKIMHWTYP

SEQ ID NO: 20270 - protein, 1218 aa, Artificial Sequence
  Synthetic polypeptide
WFYKGLFPLYSALVFSAALRGKCLASSSPSTMIFKFPEASTAMLNSSKPMDLKLCTGPIPNTTQLCHIPCPTECEVSPWSAWGPCTYENCNDQQGKKGFKLRKRRITNEPTGGSGVTGNCPHLLEAIPCEEPACYDWKAVRLGNCEPDNGKECGPGTQVQEVVCINSDGEEVDRQLCRDAIFPIPVACDAPCPKDCVLSTWSTWSSCSHTCSGKTTEGKQIRARSILAYAGEEGGIRCPNSSALQEVRSCNEHPCTVYHWQTGPWGQCIEDTSVSSFNTTTTWNGEASCSVGMQTRKVICVRVNVGQVGPKKCPESLRPETVRPCLLPCKKDCIVTPYSDWTSCPSSCKEGDSSIRKQSRHRVIIQLPANGGRDCTDPLYEEKACEAPQACQSYRWKTHKWRRCQLVPWSVQQDSPGAQEGCGPGRQARAITCRKQDGGQAGIHECLQYAGPVPALTQACQIPCQDDCQLTSWSKFSSCNGDCGAVRTRKRTLVGKSKKKEKCKNSHLYPLIETQYCPCDKYNAQPVGNWSDCILPEGKVEVLLGMKVQGDIKECGQGYRYQAMACYDQNGRLVETSRCNSHGYIEEACIIPCPSDCKLSEWSNWSRCSKSCGSGVKVRSKWLREKPYNGGRPCPKLDHVNQAQVYEVVPCHSDCNQYLWVTEPWSICKVTFVNMRENCGEGVQTRKVRCMQNTADGPSEHVEDYLCDPEEMPLGSRVCKLPCPEDCVISEWGPWTQCVLPCNQSSFRQRSADPIRQPADEGRSCPNAVEKEPCNLNKNCYHYDYNVTDWSTCQLSEKAVCGNGIKTRMLDCVRSDGKSVDLKYCEALGLEKNWQMNTSCMVECPVNCQLSDWSPWSECSQTCGLTGKMIRRRTVTQPFQGDGRPCPSLMDQSKPCPVKPCYRWQYGQWSPCQVQEAQCGEGTRTRNISCVVSDGSADDFSKVVDEEFCADIELIIDGNKNMVLEESCSQPCPGDCYLKDWSSWSLCQLTCVNGEDLGFGGIQVRSRPVIIQELENQHLCPEQMLETKSCYDGQCYEYKWMASAWKGSSRTVWCQRSDGINVTGGCLVMSQPDADRSCNPPCSQPHSYCSETKTCHCEEGYTEVMSSNSTLEQCTLIPVVVLPTMEDKRGDVKTSRAVHPTQPSSNPAGRGRTWFLQPFGPDGRLKTWVYGVAAGAFVLLIFIVSMIYLACKKPKKPQRRQNNRLKPLTLAYDGDADM

SEQ ID NO: 20271 - protein, 49 aa, Artificial Sequence
  Synthetic polypeptide
AGEPPQRPRVRRPREVRGLGPGPGSPPAQLASQAGLRGCDRRAGDYALL

SEQ ID NO: 20272 - protein, 35 aa, Artificial Sequence
  Synthetic polypeptide
AGEPPQRPRVRRPREVRGLGPGPGSPPAQLASQGF

SEQ ID NO: 20273 - protein, 83 aa, Artificial Sequence
  Synthetic polypeptide
GGGATTAASSTPTPRSSRTRTRTGIPTGSTRISRILMPFVKTCLMVLPSVQTIWKSVTDVIIAPLCTSVGRCFSSVSLQLSQD

SEQ ID NO: 20274 - protein, 39 aa, Artificial Sequence
  Synthetic polypeptide
GGGATTAASSTPTPRSSRTRTRTGIPTGSTRISSWASRM

SEQ ID NO: 20275 - protein, 95 aa, Artificial Sequence
  Synthetic polypeptide
RGSHHSGLEYADPEKFADSDQDRDPHRLNSHLKDFNAFCKDLPNGSAFSADNMEECDRCYHCSIVYERRTMLLFCQPATEPGLNTWTPGLEIGIL

SEQ ID NO: 20276 - protein, 96 aa, Artificial Sequence
  Synthetic polypeptide
RGSHHSGLEYADPEKFADSDQDRDPHRLNSHLKLGFEDVIAEPVTTHSFDKVWICSHALFEISKYVMYKFLTVFLAIPLAFIAGILFATLSCLHIW

SEQ ID NO: 20277 - protein, 145 aa, Artificial Sequence
  Synthetic polypeptide
RGSHHSGLEYADPEKFADSDQDRDPHRLNSHLKLGFEDVIAEPVTTHSFDKVWICSHALFEISKYVMYKFLTVFLAIPLAFIAGILFATLSCLHIWILMPFVKTCLMVLPSVQTIWKSVTDVIIAPLCTSVGRCFSSVSLQLSQD

SEQ ID NO: 20278 - protein, 116 aa, Artificial Sequence
  Synthetic polypeptide
AHPIIPTPQKAKIDFEDVIAEPEGTHSFDGIWKASFTTFTVTKYWFYRLLSALFGIPMALIWGIYFAILSFLHIWAVVPCIKSFLIEIQCISRVYSIYVHTVCDPLFEAVGKIFSN

SEQ ID NO: 20279 - protein, 125 aa, Artificial Sequence
  Synthetic polypeptide
AHPIIPTPQKAKIDFEDVIAEPEGTHSFDGIWKASFTTFTVTKYWFYRLLSALFGIPMALIWGIYFAILSFLHIWAVVPCIKSFLIEIQCISRVYSIYVHTVCDPLFEAVGKIFSNVRINLQKEI

SEQ ID NO: 20280 - protein, 13 aa, Artificial Sequence
  Synthetic polypeptide
GSSYYTNSSEGQD

SEQ ID NO: 20281 - protein, 18 aa, Artificial Sequence
  Synthetic polypeptide
WLILLYQLLRRPRLTLKM

SEQ ID NO: 20282 - protein, 16 aa, Artificial Sequence
  Synthetic polypeptide
NFNYDAEEESAGPDQF

SEQ ID NO: 20283 - protein, 1424 aa, Artificial Sequence
  Synthetic polypeptide
RRKCWTRPILRKGYRQRLELSDIYQIPSVDSADNLSEKLEREWDRELASKKNPKLINALRRCFFWRFMFYGIFLYLGEVTKAVQPLLLGRIIASYDPDNKEERSIAIYLGIGLCLLFIVRTLLLHPAIFGLHHIGMQMRIAMFSLIYKKGLALAHFVWIAPLQVALLMGLIWELLQASAFCGLGFLIVLALFQAGLGRMMMKYRDQRAGKISERLVITSEMIENIQSVKAYCWEEAMEKMIENLRQTELKLTRKAAYVRYFNSSAFFFSGFFVVFLSVLPYALIKGIILRKIFTTISFCIVLRMAVTRQFPWAVQTWYDSLGAINKIQDFLQKQEYKTLEYNLTTTEVVMENVTAFWEEGFGELFEKAKQNNNNRKTSNGDDSLFFSNFSLLGTPVLKDINFKIERGQLLAVAGSTGAGKTSLLMVIMGELEPSEGKIKHSGRISFCSQFSWIMPGTIKENIIFGVSYDEYRYRSVIKACQLEEDISKFAEKDNIVLGEGGITLSGGQRARISLARAVYKDADLYLLDSPFGYLDVLTEKEIFESCVCKLMANKTRILVTSKMEHLKKADKILILHEGSSYFYGTFSELQNLQPDFSSKLMGCDSFDQFSAERRNSILTETLHRFSLEGDAPVSWTETKKQSFKQTGEFGEKRKNSILNPINSIRKFSIVQKTPLQMNGIEEDSDEPLERRLSLVPDSEQGEAILPRISVISTGPTLQARRRQSVLNLMTHSVNQGQNIHRKTTASTRKVSLAPQANLTELDIYSRRLSQETGLEISEEINEEDLKECFFDDMESIPAVTTWNTYLRYITVHKSLIFVLIWCLVIFLAEVAASLVVLWLLGNTPLQDKGNSTHSRNNSYAVIITSTSSYYVFYIYVGVADTLLAMGFFRGLPLVHTLITVSKILHHKMLHSVLQAPMSTLNTLKAGGILNRFSKDIAILDDLLPLTIFDFIQLLLIVIGAIAVVAVLQPYIFVATVPVIVAFIMLRAYFLQTSQQLKQLESEGRSPIFTHLVTSLKGLWTLRAFGRQPYFETLFHKALNLHTANWFLYLSTLRWFQMRIEMIFVIFFIAVTFISILTTGEGEGRVGIILTLAMNIMSTLQWAVNSSIDVDSLMRSVSRVFKFIDMPTEGKPTKSTKPYKNGQLSKVMIIENSHVKKDDIWPSGGQMTVKDLTAKYTEGGNAILENISFSISPGQRVGLLGRTGSGKSTLLSAFLRLLNTEGEIQIDGVSWDSITLQQWRKAFGVIPQKVFIFSGTFRKNLDPYEQWSDQEIWKVADEVGLRSVIEQFPGKLDFVLVDGGCVLSHGHKQLMCLARSVLSKAKILLLDEPSAHLDPVTYQIIRRTLKQAFADCTVILCEHRIEAMLECQQFLVIEENKVRQYDSIQKLLNERSLFRQAISPSDRVKLFPHRNSSKCKSKPQIAALK

SEQ ID NO: 20284 - protein, 1466 aa, Artificial Sequence
  Synthetic polypeptide
RRKCWTRPILRKGYRQRLELSDIYQIPSVDSADNLSEKLEREWDRELASKKNPKLINALRRCFFWRFMFYGIFLYLGEVTKAVQPLLLGRIIASYDPDNKEERSIAIYLGIGLCLLFIVRTLLLHPAIFGLHHIGMQMRIAMFSLIYKKTLKLSSRVLDKISIGQLVSLLSNNLNKFDEGLALAHFVWIAPLQVALLMGLIWELLQASAFCGLGFLIVLALFQAGLGRMMMKYRDQRAGKISERLVITSEMIENIQSVKAYCWEEAMEKMIENLRQTELKLTRKAAYVRYFNSSAFFFSGFFVVFLSVLPYALIKGIILRKIFTTISFCIVLRMAVTRQFPWAVQTWYDSLGAINKIQDFLQKQEYKTLEYNLTTTEVVMENVTAFWEEGFGELFEKAKQNNNNRKTSNGDDSLFFSNFSLLGTPVLKDINFKIERGQLLAVAGSTGAGKTSLLMVIMGELEPSEGKIKHSGRISFCSQFSWIMPGTIKENIIFGVSYDEYRYRSVIKACQLEEDISKFAEKDNIVLGEGGITLSGGQRARISLARAVYKDADLYLLDSPFGYLDVLTEKEIFESCVCKLMANKTRILVTSKMEHLKKADKILILHEGSSYFYGTFSELQNLQPDFSSKLMGCDSFDQFSAERRNSILTETLHRFSLEGDAPVSWTETKKQSFKQTGEFGEKRKNSILNPINSIRKFSIVQKTPLQMNGIEEDSDEPLERRLSLVPDSEQGEAILPRISVISTGPTLQARRRQSVLNLMTHSVNQGQNIHRKTTASTRKVSLAPQANLTELDIYSRRLSQETGLEISEEINEEDLKECFFDDMESIPAVTTWNTYLRYITVHKSLIFVLIWCLVIFLAEVAASLVVLWLLGNTPLQDKGNSTHSRNNSYAVIITSTSSYYVFYIYVGVADTLLAMGFFRGLPLVHTLITVSKILHHKMLHSVLQAPMSTLNTLKAGGILNRFSKDIAILDDLLPLTIFDFIQLLLIVIGAIAVVAVLQPYIFVATVPVIVAFIMLRAYFLQTSQQLKQLESEGRSPIFTHLVTSLKGLWTLRAFGRQPYFETLFHKALNLHTANWFLYLSTLRWFQMRIEMIFVIFFIAVTFISILTTGEGEGRVGIILTLAMNIMSTLQWAVNSSIDVDSLMRSVSRVFKFIDMPTEGKPTKSTKPYKNGQLSKVMIIENSHVKKDDIWPSGGQMTVKDLTAKYTEGGNAILENISFSISPGQRVGLLGRTGSGKSTLLSAFLRLLNTEGEIQIDGVSWDSITLQQWRKAFGVIPQKVFIFSGTFRKNLDPYEQWSDQEIWKVADEVGLRSVIEQFPGKLDFVLVDGGCVLSHGHKQLMCLARSVLSKAKILLLDEPSAHLDPVTYQIIRRTLKQAFADCTVILCEHRIEAMLECQQFLVIEENKVRQYDSIQKLLNERSLFRQAISPSDRVKLFPHRNSSKCKSKPQIAALKEETEEEVQDTRL

SEQ ID NO: 20285 - protein, 1405 aa, Artificial Sequence
  Synthetic polypeptide
RRKCWTRPILRKGYRQRLELSDIYQIPSVDSADNLSEKLEREWDRELASKKNPKLINALRRCFFWRFMFYGIFLYLGEVTKAVQPLLLGRIIASYDPDNKEERSIAIYLGIGLCLLFIVRTLLLHPAIFGLHHIGMQMRIAMFSLIYKKTLKLSSRVLDKISIGQLVSLLSNNLNKFDEGLALAHFVWIAPLQVALLMGLIWELLQASAFCGLGFLIVLALFQAGLGRMMMKYRDQRAGKISERLVITSEMIENIQSVKAYCWEEAMEKMIENLRQTELKLTRKAAYVRYFNSSAFFFSGFFVVFLSVLPYALIKGIILRKIFTTISFCIVLRMAVTRQFPWAVQTWYDSLGAINKIQDFLQKQEYKTLEYNLTTTEVVMENVTAFWEETSLLMVIMGELEPSEGKIKHSGRISFCSQFSWIMPGTIKENIIFGVSYDEYRYRSVIKACQLEEDISKFAEKDNIVLGEGGITLSGGQRARISLARAVYKDADLYLLDSPFGYLDVLTEKEIFESCVCKLMANKTRILVTSKMEHLKKADKILILHEGSSYFYGTFSELQNLQPDFSSKLMGCDSFDQFSAERRNSILTETLHRFSLEGDAPVSWTETKKQSFKQTGEFGEKRKNSILNPINSIRKFSIVQKTPLQMNGIEEDSDEPLERRLSLVPDSEQGEAILPRISVISTGPTLQARRRQSVLNLMTHSVNQGQNIHRKTTASTRKVSLAPQANLTELDIYSRRLSQETGLEISEEINEEDLKECFFDDMESIPAVTTWNTYLRYITVHKSLIFVLIWCLVIFLAEVAASLVVLWLLGNTPLQDKGNSTHSRNNSYAVIITSTSSYYVFYIYVGVADTLLAMGFFRGLPLVHTLITVSKILHHKMLHSVLQAPMSTLNTLKAGGILNRFSKDIAILDDLLPLTIFDFIQLLLIVIGAIAVVAVLQPYIFVATVPVIVAFIMLRAYFLQTSQQLKQLESEGRSPIFTHLVTSLKGLWTLRAFGRQPYFETLFHKALNLHTANWFLYLSTLRWFQMRIEMIFVIFFIAVTFISILTTGEGEGRVGIILTLAMNIMSTLQWAVNSSIDVDSLMRSVSRVFKFIDMPTEGKPTKSTKPYKNGQLSKVMIIENSHVKKDDIWPSGGQMTVKDLTAKYTEGGNAILENISFSISPGQRVGLLGRTGSGKSTLLSAFLRLLNTEGEIQIDGVSWDSITLQQWRKAFGVIPQKVFIFSGTFRKNLDPYEQWSDQEIWKVADEVGLRSVIEQFPGKLDFVLVDGGCVLSHGHKQLMCLARSVLSKAKILLLDEPSAHLDPVTYQIIRRTLKQAFADCTVILCEHRIEAMLECQQFLVIEENKVRQYDSIQKLLNERSLFRQAISPSDRVKLFPHRNSSKCKSKPQIAALKEETEEEVQDTRL

SEQ ID NO: 20286 - protein, 37 aa, Artificial Sequence
  Synthetic polypeptide
TKTLITMLKKKVLDQTNFEERIQTAPGIVRHIPNPFC

SEQ ID NO: 20287 - protein, 13 aa, Artificial Sequence
  Synthetic polypeptide
GLPSHVELLGSDL

SEQ ID NO: 20288 - protein, 164 aa, Artificial Sequence
  Synthetic polypeptide
GSFPCSCTLFLACHHVRHNSFPSAMIVSFLRPSQPCGTVGLRSVIEQFPGKLDFVLVDGGCVLSHGHKQLMCLARSVLSKAKILLLDEPSAHLDPVTYQIIRRTLKQAFADCTVILCEHRIEAMLECQQFLIMMVAGPLFNGGIASLLAMKEKVISTNPGNSYL

SEQ ID NO: 20289 - protein, 185 aa, Artificial Sequence
  Synthetic polypeptide
GSFPCSCTLFLACHHVRHNSFPSAMIVSFLRPSQPCGTVGLRSVIEQFPGKLDFVLVDGGCVLSHGHKQLMCLARSVLSKAKILLLDEPSAHLDPVTYQIIRRTLKQAFADCTVILCEHRIEAMLECQQFLVIEENKVRQYDSIQKLLNERSLFRQAISPSDRVKLFPHRNSSKCKSKPQIAALK

SEQ ID NO: 20290 - protein, 197 aa, Artificial Sequence
  Synthetic polypeptide
GSFPCSCTLFLACHHVRHNSFPSAMIVSFLRPSQPCGTVGLRSVIEQFPGKLDFVLVDGGCVLSHGHKQLMCLARSVLSKAKILLLDEPSAHLDPVTYQIIRRTLKQAFADCTVILCEHRIEAMLECQQFLVIEENKVRQYDSIQKLLNERSLFRQAISPSDRVKLFPHRNSSKCKSKPQIAALKEETEEEVQDTRL

SEQ ID NO: 20291 - protein, 33 aa, Artificial Sequence
  Synthetic polypeptide
LFPFRHDCKFPEAFPAMWNCWAQICDRTVSWEA

SEQ ID NO: 20292 - protein, 77 aa, Artificial Sequence; identical to SEQ ID NO: 4038
  Synthetic polypeptide

SEQ ID NO: 20293 - protein, 102 aa, Artificial Sequence; identical to SEQ ID NO: 3598
  Synthetic polypeptide

SEQ ID NO: 20294 - protein, 102 aa, Artificial Sequence; identical to SEQ ID NO: 3596
  Synthetic polypeptide

SEQ ID NO: 20295 - protein, 13 aa, Artificial Sequence
  Synthetic polypeptide
KRCTSRQQHLLSP

SEQ ID NO: 20296 - protein, 18 aa, Artificial Sequence
  Synthetic polypeptide
EEPSTLPSVLQCWHSCHF

SEQ ID NO: 20297 - protein, 31 aa, Artificial Sequence
  Synthetic polypeptide
HSAQCTAVLALLSLLMKTEMLLDVMISSSIK

SEQ ID NO: 20298 - protein, 36 aa, Artificial Sequence
  Synthetic polypeptide
VKSLALCPVYCSAGTPVTFNENGDAPGRYDIFQYQI

SEQ ID NO: 20299 - protein, 466 aa, Artificial Sequence
  Synthetic polypeptide
VKSLALCPVYCSAGTPVTFNENGDAPGRYDIFQYQITNKSTEYKVIGHWTNQLHLKVEDMQWAHREHTHPASVCSLPCKPGERKKTVKGVPCCWHCERCEGYNYQVDELSCELCPLDQRPNMNRTGCQLIPIIKLEWHSPWAVVPVFVAILGIIATTFVIVTFVRYNDTPIVRASGRELSYVLLTGIFLCYSITFLMIAAPDTIICSFRRVFLGLGMCFSYAALLTKTNRIHRIFEQGKKSVTAPKFISPASQLVITFSLISVQLLGVFVWFVVDPPHIIIDYGEQRTLDPEKARGVLKCDISDLSLICSLGYSILLMVTCTVYAIKTRGVPETFNEAKPIGFTMYTTCIIWLAFIPIFFGTAQSAEKMYIQTTTLTVSMSLSASVSLGMLYMPKVYIIIFHPEQNVQKRKRSFKAVVTAATMQSKLIQKGNDRPNGEVKSELCESLETNSKSSVEFPMVKSGSTS

SEQ ID NO: 20300 - protein, 466 aa, Artificial Sequence
  Synthetic polypeptide
VKSLALCPVYCSAGTPVTFNENGDAPGRYDIFQYQITNKSTEYKVIGHWTNQLHLKVEDMQWAHREHTHPASVCSLPCKPGERKKTVKGVPCCWHCERCEGYNYQVDELSCELCPLDQRPNMNRTGCQLIPIIKLEWHSPWAVVPVFVAILGIIATTFVIVTFVRYNDTPIVRASGRELSYVLLTGIFLCYSITFLMIAAPDTIICSFRRVFLGLGMCFSYAALLTKTNRIHRIFEQGKKSVTAPKFISPASQLVITFSLISVQLLGVFVWFVVDPPHIIIDYGEQRTLDPEKARGVLKCDISDLSLICSLGYSILLMVTCTVYAIKTRGVPETFNEAKPIGFTMYTTCIIWLAFIPIFFGTAQSAEKMYIQTTTLTVSMSLSASVSLGMLYMPKVYIIIFHPEQNVQKRKRSFKAVVTAATMQSKLIQKGNDRPNGEVKSELCESLETNTSSTKTTYISYSNHSI

SEQ ID NO: 20301 - protein, 6 aa, Artificial Sequence
  Synthetic polypeptide
KLPSSG

SEQ ID NO: 20302 - protein, 71 aa, Artificial Sequence
  Synthetic polypeptide
LLKAPQQRLTEELQTVENGYHDNPTLEVMETSSEMQEKKVVSLNGELGDSWIVPLDNLTKDDLDEEEDTHL

SEQ ID NO: 20303 - protein, 36 aa, Artificial Sequence
  Synthetic polypeptide
LPPTPIQTISESISVVVKSSPAAANRGAADSGEWLP

SEQ ID NO: 20304 - protein, 21 aa, Artificial Sequence
  Synthetic polypeptide
MESGRLAAANRGAADSGEWLP

SEQ ID NO: 20305 - protein, 9 aa, Artificial Sequence
  Synthetic polypeptide
TGVRETCSG

SEQ ID NO: 20306 - protein, 71 aa, Artificial Sequence
  Synthetic polypeptide
WSQGDLQRLTEELQTVENGYHDNPTLEVMETSSEMQEKKVVSLNGELGDSWIVPLDNLTKDDLDEEEDTHL

SEQ ID NO: 20307 - protein, 10 aa, Artificial Sequence
  Synthetic polypeptide
NSNPDYYGLI

SEQ ID NO: 20308 - protein, 534 aa, Artificial Sequence
  Synthetic polypeptide
SRLHELSRIATQTTTDSSNKTAPTPASSVTIMATDTAQQSTVPTSKANEILASVKATTLGVSSDSPGTTTLAQQVSGPVNTTVARGGGSGNPTTTIESPKSTKSADTTTVATSTATAKPNTTSSQNGAEDTTNSGGKSSHSVTTDLTSTKAEHLTTPHPTSPLSPRQPTSTHPVATPTSSGHDHLMKISSSSSTVAIPGYTFTSPGMTTTLLETVFHHVSQAGLELLTSGDLPTLASQSAGITASSVISQRTQQTSSQMPASSTAPSSQETVQPTSPATALRTPTLPETMSSSPTAASTTHRYPKTPSPTVAHESNWAKCEDLETQTQSEKQLVLNLTGNTLCAGGASDEKLISLICRAVKATFNPAQDKCGIRLASVPGSQTVVVKEITIHTKLPAKDVYERLKDKWDELKEAGVSDMKLGDQGPPEEAEDRFSMPLIITIVCMASFLLLVAALYGCCHQRLSQRKDQQRLTEELQTVENGYHDNPTLEVMETSSEMQEKKVVSLNGELGDSWIVPLDNLTKDDLDEEEDTHL

SEQ ID NO: 20309 - protein, 502 aa, Artificial Sequence
  Synthetic polypeptide
SRLHELSRIATQTTTDSSNKTAPTPASSVTIMATDTAQQSTVPTSKANEILASVKATTLGVSSDSPGTTTLAQQVSGPVNTTVARGGGSGNPTTTIESPKSTKSADTTTVATSTATAKPNTTSSQNGAEDTTNSGGKSSHSVTTDLTSTKAEHLTTPHPTSPLSPRQPTSTHPVATPTSSGHDHLMKISSSSSTVAIPGYTFTSPGMTTTLPSSVISQRTQQTSSQMPASSTAPSSQETVQPTSPATALRTPTLPETMSSSPTAASTTHRYPKTPSPTVAHESNWAKCEDLETQTQSEKQLVLNLTGNTLCAGGASDEKLISLICRAVKATFNPAQDKCGIRLASVPGSQTVVVKEITIHTKLPAKDVYERLKDKWDELKEAGVSDMKLGDQGPPEEAEDRFSMPLIITIVCMASFLLLVAALYGCCHQRLSQRKDQQRLTEELQTVENGYHDNPTLEVMETSSEMQEKKVVSLNGELGDSWIVPLDNLTKDDLDEEEDTHL

SEQ ID NO: 20310 - protein, 300 aa, Artificial Sequence
  Synthetic polypeptide
SRLHELSRIATQTTTDSSNKTAPTPASSVTIMATDTAQQSTVPTSKANEILASVKATTLGVSSDSPGTTTLAQQVSGPVNTTVARGGGSGNPTTTIESPKSTKSADTTTVATSTATAKPNTTSSQNGAEDTTNSGGKSSHSVTTDLTSTKAEHLTTPHPTSPLSPRQPTSTHPVATPTSSGHDHLMKISSSSSTVAIPGYTFTSPGMTTTLPSSVISQRTQQTSSQMPASSTAPSSQETVQPTSPATALRTPTLPETMSSSPTAASTTHRYPKTPSPTVAHESNWVTPAGVGQVGEPRLG

SEQ ID NO: 20311 - protein, 502 aa, Artificial Sequence
  Synthetic polypeptide
SRLHELSRIATQTTTDSSNKTAPTPASSVTIMATDTAQQSTVPTSKANEILASVKATTLGVSSDSPGTTTLAQQVSGPVNTTVARGGGSGNPTTTIESPKSTKSADTTTVATSTATAKPNTTSSQNGAEDTTNSGGKSSHSVTTDLTSTKAEHLTTPHPTSPLSPRQPTSTHPVATPTSSGHDHLMKISSSSSTVAIPGYTFTSPGMTTTLPSSVISQRTQQTSSQMPASSTAPSSQETVQPTSPATALRTPTLPETMSSSPTAASTTHRYPKTPSPTVAHESNWVTPAGVGTQTRVEEALRQALTHSLLPAGGASDEKLISLICRAVKATFNPAQDKCGIRLASVPGSQTVVVKEITIHTKLPAKDVYERLKDKWDELKEAGVSDMKLGDQGPPEEAEDRFSMPLIITIVCMASFLLLVAALYGCCHQRLSQRKDQQRLTEELQTVENGYHDNPTLEVMETSSEMQEKKVVSLNGELGDSWIVPLDNLTKDDLDEEEDTHL

SEQ ID NO: 20312 - protein, 1525 aa, Artificial Sequence
  Synthetic polypeptide
GAETHRLWRKETCGPVFSAMSLHLPTQLLTIDDNFCGLDMNAPLGVSDMVRGIPVFTEDRDRMTSVIAYVYKNHSLAFVGTKSGKLKKIRVDGPRGNALQYETVQVVDPGPVLRDMAFSKDHEQLYIMSERQLTRVPVESCGQYQSCGECLGSGDPHCGWCVLHNTCTRKERCERSKEPRRFASEMKQCVRLTVHPNNISVSQYNVLLVLETYNVPELSAGVNCTFEDLSEMDGLVVGNQIQCYSPAAKEVPRIITENGDHHVVQLQLKSKETGMTFASTSFVFYNCSVHNSCLSCVESPYRCHWCKYRHVCTHDPKTCSFQEGRVKLPEDCPQLLRVDKILVPVEVIKPITLKAKNLPQPQSGQRGYECILNIQGSEQRVPALRFNSSSVQCQNTSYSYEGMEINNLPVELTVVWNGHFNIDNPAQNKVHLYKCGAMRESCGLCLKADPDFACGWCQGPGQCTLRQHCPAQESQWLELSGAKSKCTNPRITEIIPVTGPREGGTKVTIRGENLGLEFRDIASHVKVAGVECSPLVDGYIPAEQIVCEMGEAKPSQHAGFVEICVAVCRPEFMARSSQLYYFMTLTLSDLKPSRGPMSGGTQVTITGTNLNAGSNVVVMFGKQPCLFHRRSPSYIVCNTTSSDEVLEMKVSVQVDRAKIHQDLVFQYVEDPTIVRIEPEWSIVSGNTPIAVWGTHLDLIQNPQIRAKHGGKEHINICEVLNATEMTCQAPALALGPDHQSDLTERPEEFGFILDNVQSLLILNKTNFTYYPNPVFEAFGPSGILELKPGTPIILKGKNLIPPVAGGNVKLNYTVLVGEKPCTVTVSDVQLLCESPNLIGRHKVMARVGGMEYSPGMVYIAPDSPLSLPAIVSIAVAGGLLIIFIVAVLIAYKRKSRESDLTLKRLQMQMDNLESRVALECKEAFAELQTDIHELTSDLDGAGIPFLDYRTYTMRVLFPGIEDHPVLRDLEVPGYRQERVEKGLKLFAQLINNKVFLLSFIRTLESQRSFSMRDRGNVASLIMTVLQSKLEYATDVLKQLLADLIDKNLESKNHPKLLLRRTESVAEKMLTNWFTFLLYKFLKECAGEPLFSLFCAIKQQMEKGPIDAITGEARYSLSEDKLIRQQIDYKTLVLSCVSPDNANSPEVPVKILNCDTITQVKEKILDAIFKNVPCSHRPKAADMDLEWRQGSGARMILQDEDITTKIENDWKRLNTLAHYQVPDGSVVALVSKQVTAYNAVNNSTVSRTSASKYENMIRYTGSPDSLRSRTPMITPDLESGVKMWHLVKNHEHGDQKEGDRGSKMVSEIYLTRLLATKGTLQKFVDDLFETIFSTAHRGSALPLAIKYMFDFLDEQADKHGIHDPHVRHTWKSNCLPLRFWVNMIKNPQFVFDIHKNSITDACLSVVAQTFMDSCSTSEHRLGKDSPSNKLLYAKDIPSYKNWVERYYSDIGKMPAISDQDMNAYLAEQSRMHMNEFNTMSALSEIFSYVGKYSEEILGPLDHDDQCGKQKLAYKLEQVITLMSLDS

SEQ ID NO: 20313 - protein, 123 aa, Artificial Sequence
  Synthetic polypeptide
GAETHRLWRKETCGPVFSAMSLHLPTQLLTIDDNFCGLDMNAPLGVSDMVRGIPVFTEDRDRMTSVIAYVYKNHSLAFVGTKSGKLKKMPGTSLCPTLELQTGPRSHRATVTLELLFSSCSSN

SEQ ID NO: 20314 - protein, 153 aa, Artificial Sequence
  Synthetic polypeptide
GAETHRLWRKETCGPVFSAMSLHLPTQLLTIDDNFCGLDMNAPLGVSDMVRGIPVFTEDRDRMTSVIAYVYKNHSLAFVGTKSGKLKKSFGTGPQGGITQEWIGVEGDPPGANIASQEQMLCVYLQCSSHKAISDQRVQPLLCCFLNVPGNSS

SEQ ID NO: 20315 - protein, 36 aa, Artificial Sequence
  Synthetic polypeptide
GRGWMRGRDTQIMEKGDLRTCVFCHVPAPAHSALNH

SEQ ID NO: 20316 - protein, 34 aa, Artificial Sequence
  Synthetic polypeptide
WEGLDEGQRHTDYGERRPADLCFLPCPCTCPLSS

SEQ ID NO: 20317 - protein, 1519 aa, Artificial Sequence
  Synthetic polypeptide
DLSSSSLPSAMIVRPPQPRGNLLTIDDNFCGLDMNAPLGVSDMVRGIPVFTEDRDRMTSVIAYVYKNHSLAFVGTKSGKLKKIRVDGPRGNALQYETVQVVDPGPVLRDMAFSKDHEQLYIMSERQLTRVPVESCGQYQSCGECLGSGDPHCGWCVLHNTCTRKERCERSKEPRRFASEMKQCVRLTVHPNNISVSQYNVLLVLETYNVPELSAGVNCTFEDLSEMDGLVVGNQIQCYSPAAKEVPRIITENGDHHVVQLQLKSKETGMTFASTSFVFYNCSVHNSCLSCVESPYRCHWCKYRHVCTHDPKTCSFQEGRVKLPEDCPQLLRVDKILVPVEVIKPITLKAKNLPQPQSGQRGYECILNIQGSEQRVPALRFNSSSVQCQNTSYSYEGMEINNLPVELTVVWNGHFNIDNPAQNKVHLYKCGAMRESCGLCLKADPDFACGWCQGPGQCTLRQHCPAQESQWLELSGAKSKCTNPRITEIIPVTGPREGGTKVTIRGENLGLEFRDIASHVKVAGVECSPLVDGYIPAEQIVCEMGEAKPSQHAGFVEICVAVCRPEFMARSSQLYYFMTLTLSDLKPSRGPMSGGTQVTITGTNLNAGSNVVVMFGKQPCLFHRRSPSYIVCNTTSSDEVLEMKVSVQVDRAKIHQDLVFQYVEDPTIVRIEPEWSIVSGNTPIAVWGTHLDLIQNPQIRAKHGGKEHINICEVLNATEMTCQAPALALGPDHQSDLTERPEEFGFILDNVQSLLILNKTNFTYYPNPVFEAFGPSGILELKPGTPIILKGKNLIPPVAGGNVKLNYTVLVGEKPCTVTVSDVQLLCESPNLIGRHKVMARVGGMEYSPGMVYIAPDSPLSLPAIVSIAVAGGLLIIFIVAVLIAYKRKSRESDLTLKRLQMQMDNLESRVALECKEAFAELQTDIHELTSDLDGAGIPFLDYRTYTMRVLFPGIEDHPVLRDLEVPGYRQERVEKGLKLFAQLINNKVFLLSFIRTLESQRSFSMRDRGNVASLIMTVLQSKLEYATDVLKQLLADLIDKNLESKNHPKLLLRRTESVAEKMLTNWFTFLLYKFLKECAGEPLFSLFCAIKQQMEKGPIDAITGEARYSLSEDKLIRQQIDYKTLVLSCVSPDNANSPEVPVKILNCDTITQVKEKILDAIFKNVPCSHRPKAADMDLEWRQGSGARMILQDEDITTKIENDWKRLNTLAHYQVPDGSVVALVSKQVTAYNAVNNSTVSRTSASKYENMIRYTGSPDSLRSRTPMITPDLESGVKMWHLVKNHEHGDQKEGDRGSKMVSEIYLTRLLATKGTLQKFVDDLFETIFSTAHRGSALPLAIKYMFDFLDEQADKHGIHDPHVRHTWKSNCLPLRFWVNMIKNPQFVFDIHKNSITDACLSVVAQTFMDSCSTSEHRLGKDSPSNKLLYAKDIPSYKNWVERYYSDIGKMPAISDQDMNAYLAEQSRMHMNEFNTMSALSEIFSYVGKYSEEILGPLDHDDQCGKQKLAYKLEQVITLMSLDS

SEQ ID NO: 20318 - protein, 117 aa, Artificial Sequence
  Synthetic polypeptide
DLSSSSLPSAMIVRPPQPRGNLLTIDDNFCGLDMNAPLGVSDMVRGIPVFTEDRDRMTSVIAYVYKNHSLAFVGTKSGKLKKMPGTSLCPTLELQTGPRSHRATVTLELLFSSCSSN

SEQ ID NO: 20319 - protein, 147 aa, Artificial Sequence
  Synthetic polypeptide
DLSSSSLPSAMIVRPPQPRGNLLTIDDNFCGLDMNAPLGVSDMVRGIPVFTEDRDRMTSVIAYVYKNHSLAFVGTKSGKLKKSFGTGPQGGITQEWIGVEGDPPGANIASQEQMLCVYLQCSSHKAISDQRVQPLLCCFLNVPGNSS

SEQ ID NO: 20320 - protein, 9 aa, Artificial Sequence
  Synthetic polypeptide
GLPSHVEIS

SEQ ID NO: 20321 - protein, 46 aa, Artificial Sequence
  Synthetic polypeptide
GYYKGVFPCTHSLFLPAAIRVRPVFLLLAFCHDCEASPATWKSLNH

SEQ ID NO: 20322 - protein, 40 aa, Artificial Sequence
  Synthetic polypeptide
TCRTESNLPGRPPASGSCTSPQPSCGKWSSQGAQSDFGLE

SEQ ID NO: 20323 - protein, 960 aa, Artificial Sequence
  Synthetic polypeptide
VSGDLPVMLPVKPAELKAISRAGLQHLAPAHPLSLPVANGPAKEPRATLDWSENAVNGEHLWLETNVSGDLCYLGEENCQVRFAKSALRRKCAVCKIVVHTACIEQLEKINFRCKPTFREGGSRSPRENFVRHHWVHRRRQEGKCKQCGKGFQQKFSFHSKEIVAISCSWCKQAFHNKVTCFMLHHIEEPCSLGAHAAVIVPPTWIIKVKKPQNSLKASNRKKKRTSFKRKASKRGMEQENKGRPFVIKPISSPLMKPLLVFVNPKSGGNQGTKVLQMFMWYLNPRQVFDLSQEGPKDALELYRKVPNLRILACGGDGTVGWILSILDELQLSPQPPVGVLPLGTGNDLARTLNWGGGYTDEPVSKILCQVEDGTVVQLDRWNLHVERNPDLPPEELEDGVCKLPLNVFNNYFSLGFDAHVTLEFHESREANPEKFNSRFRNKMFYAGAAFSDFLQRSSRDLSKHVKVVCDGTDLTPKIQELKFQCIVFLNIPRYCAGTMPWGNPGDHHDFEPQRHDDGYIEVIGFTMASLAALQVGGHGERLHQCREVMLLTYKSIPMQVDGEPCRLAPAMIRISLRNQANMVQKSKRRTSMPLLNDIHQVQTADLRRVSAPPGSFTIPQSVPDRLRIRVNKISLQDYEGFHYDKEKLREASIPLGILVVRGDCDLETCRMYIDRLQEDLQSVSSGSQRVHYQDHETSFPRALSAQRLSPRWCFLDATSADRFYRIDRSQEHLHFVMEISQDEIFILDPDMVVSQPAGTPPGMPDLVVEQASGISDWWNPALRKRMLSDSGLGMIAPYYEDSDLKDLSHSRVLQSPVSSEDHAILQAVIAGDLMKLIESYKNGGSLLIQGPDHCSLLHYAAKTGNGEIVKYILDHGPSELLDMADSETGETALHKAACQRNRAVCQLLVDAGASLRKTDSKGKTPQERAQQAGDPDLAAYLESRQNYKVIGHEDLETAV

SEQ ID NO: 20324 - protein, 929 aa, Artificial Sequence
  Synthetic polypeptide
VSGDLPVMLPVKPAELKAISRAGLQHLAPAHPLSLPVANGPAKEPRATLDWSENAVNGEHLWLETNVSGDLCYLGEENCQVRFAKSALRRKCAVCKIVVHTACIEQLEKINFRCKPTFREGGSRSPRENFVRHHWVHRRRQEGKCKQCGKGFQQKFSFHSKEIVAISCSWCKQAFHNKVTCFMLHHIEEPCSLGAHAAVIVPPTWIIKVKKPQNSLKASNRKKKRTSFKRKASKRGMEQENKGRPFVIKPISSPLMKPLLVFVNPKSGGNQGTKVLQMFMWYLNPRQVFDLSQEGPKDALELYRKVPNLRILACGGDGTVGWILSILDELQLSPQPPVGVLPLGTGNDLARTLNWGGGYTDEPVSKILCQVEDGTVVQLDRWNLHVERNPDLPPEELEDGVCKLPLNVFNNYFSLGFDAHVTLEFHESREANPEKFNSRFRNKMFYAGAAFSDFLQRSSRDLSKHVKVVCDGTDLTPKIQELKFQCIVFLNIPRYCAGTMPWGNPGDHHDFEPQRHDDGYIEVIGFTMASLAALQVGGHGERLHQCREVMLLTYKSIPMQVDGEPCRLAPAMIRISLRNQANMVQKSKRRTSMPLLNDPQSVPDRLRIRVNKISLQDYEGFHYDKEKLREASIPLGILVVRGDCDLETCRMYIDRLQEDLQSVSSGSQRVHYQDHETSFPRALSAQRLSPRWCFLDDRSQEHLHFVMEISQDEIFILDPDMVVSQPAGTPPGMPDLVVEQASGISDWWNPALRKRMLSDSGLGMIAPYYEDSDLKDLSHSRVLQSPVSSEDHAILQAVIAGDLMKLIESYKNGGSLLIQGPDHCSLLHYAAKTGNGEIVKYILDHGPSELLDMADSETGETALHKAACQRNRAVCQLLVDAGASLRKTDSKGKTPQERAQQAGDPDLAAYLESRQNYKVIGHEDLETAV

SEQ ID NO: 20325 - protein, 947 aa, Artificial Sequence
  Synthetic polypeptide
VSGDLPVMLPVKPAELKAISRAGLQHLAPAHPLSLPVANGPAKEPRATLDWSENAVNGEHLWLETNVSGDLCYLGEENCQVRFAKSALRRKCAVCKIVVHTACIEQLEKINFRCKPTFREGGSRSPRENFVRHHWVHRRRQEGKCKQCGKGFQQKFSFHSKEIVAISCSWCKQAFHNKVTCFMLHHIEEPCSLGAHAAVIVPPTWIIKVKKPQNSLKASNRKKKRTSFKRKASKRGMEQENKGRPFVIKPISSPLMKPLLVFVNPKSGGNQGTKVLQMFMWYLNPRQVFDLSQEGPKDALELYRKVPNLRILACGGDGTVGWILSILDELQLSPQPPVGVLPLGTGNDLARTLNWGGGYTDEPVSKILCQVEDGTVVQLDRWNLHVERNPDLPPEELEDGVCKLPLNVFNNYFSLGFDAHVTLEFHESREANPEKFNSRFRNKMFYAGAAFSDFLQRSSRDLSKHVKVVCDGTDLTPKIQELKFQCIVFLNIPRYCAGTMPWGNPGDHHDFEPQRHDDGYIEVIGFTMASLAALQVGGHGERLHQCREVMLLTYKSIPMQVDGEPCRLAPAMIRISLRNQANMVQKSKRRTSMPLLNDPQSVPDRLRIRVNKISLQDYEGFHYDKEKLREASISDWLRTIAGELVQSFGAIPLGILVVRGDCDLETCRMYIDRLQEDLQSVSSGSQRVHYQDHETSFPRALSAQRLSPRWCFLDDRSQEHLHFVMEISQDEIFILDPDMVVSQPAGTPPGMPDLVVEQASGISDWWNPALRKRMLSDSGLGMIAPYYEDSDLKDLSHSRVLQSPVSSEDHAILQAVIAGDLMKLIESYKNGGSLLIQGPDHCSLLHYAAKTGNGEIVKYILDHGPSELLDMADSETGETALHKAACQRNRAVCQLLVDAGASLRKTDSKGKTPQERAQQAGDPDLAAYLESRQNYKVIGHEDLETAV

SEQ ID NO: 20326 - protein, 33 aa, Artificial Sequence
  Synthetic polypeptide
LWSPSFPPHFPDTALAKSTRYFLTGLAWTNCVS

SEQ ID NO: 20327 - protein, 2300 aa, Artificial Sequence
  Synthetic polypeptide
VSTFSPPTHSAADCGLLPSPLTSLIPLWQKAPVTFSLVWPGQTVFPDYTNPNCAVWWTKEFELFHNQVEFDGIWIDMNEVSNFVDGSVSGCSTNNLNNPPFTPRILDGYLFCKTLCMDAVQHWGKQYDIHNLYGYSMAVATAEAAKTVFPNKRSFILTRSTFAGSGKFAAHWLGDNTATWDDLRWSIPGVLEFNLFGIPMVGPDICGFALDTPEELCRRWMQLGAFYPFSRNHNGQGYKDQDPASFGADSLLLNSSRHYLNIRYTLLPYLYTLFFRAHSRGDTVARPLLHEFYEDNSTWDVHQQFLWGPGLLITPVLDEGAEKVMAYVPDAVWYDYETGSQVRWRKQKVEMELPGDKIGLHLRGGYIFPTQQPNTTTLASRKNPLGLIIALDENKEAKGELFWDNGETKDTVANKVYLLCEFSVTQNRLEVNISQSTYKDPNNLAFNEIKILGTEEPSNVTVKHNGVPSQTSPTVTYDSNLKVAIITDIDLLLGEAYTVEWSIKIRDEEKIDCYPDENGASAENCTARGCIWEASNSSGVPFCYFVNDLYSVSDVQYNSHGATADISLKSSVYANAFPSTPVNPLRLDVTYHKNEMLQFKIYDPNKNRYEVPVPLNIPSMPSSTPEGQLYDVLIKKNPFGIEIRRKSTGTIIWDSQLLGFTFSDMFIRISTRLPSKYLYGFGETEHRSYRRDLEWHTWGMFSRDQPPGYKKNSYGVHPYYMGLEEDGSAHGVLLLNSNAMDVTFQPLPALTYRTTGGVLDFYVFLGPTPELVTQQYTELIGRPVMVPYWSLGFQLCRYGYQNDSEIASLYDEMVAAQIPYDVQYSDIDYMERQLDFTLSPKFAGFPALINRMKADGMRVILILDPAISGNETQPYPAFTRGVEDDVFIKYPNDGDIVWGKVWPDFPDVVVNGSLDWDSQVELYRAYVAFPDFFRNSTAKWWKREIEELYNNPQNPERSLKFDGMWIDMNEPSSFVNGAVSPGCRDASLNHPPYMPHLESRDRGLSSKTLCMESQQILPDGSLVQHYNVHNLYGWSQTRPTYEAVQEVTGQRGVVITRSTFPSSGRWAGHWLGDNTAAWDQLKKSIIGMMEFSLFGISYTGADICGFFQDAEYEMCVRWMQLGAFYPFSRNHNTIGTRRQDPVSWDAAFVNISRNVLQTRYTLLPYLYTLMQKAHTEGVTVVRPLLHEFVSDQVTWDIDSQFLLGPAFLVSPVLERNARNVTAYFPRARWYDYYTGVDINARGEWKTLPAPLDHINLHVRGGYILPWQEPALNTHLSRKNPLGLIIALDENKEAKGELFWDDGQTKDTVAKKVYLLCEFSVTQNHLEVTISQSTYKDPNNLAFNEIKILGMEEPSNVTVKHNGVPSQTSPTVTYDSNLKVAIITDINLFLGEAYTVEWSIKIRDEEKIDCYPDENGDSAENCTARGCIWEASNSSGVPFCYFVNDLYSVSDVQYNSHGATADISLKSSVHANAFPSTPVNPLRLDVTYHKNEMLQFKIYDPNNNRYEVPVPLNIPSVPSSTPEGQLYDVLIKKNPFGIEIRRKSTGTIIWDSQLLGFTFNDMFIRISTRLPSKYLYGFGETEHTSYRRDLEWHTWGMFSRDQPPGYKKNSYGVHPYYMGLEEDGSAHGVLLLNSNAMDVTFQPLPALTYRTTGGVLDFYVFLGPTPELVTQQYTELIGRPVMVPYWSLGFQLCRYGYQNDSEISSLYDEMVAAQIPYDVQYSDIDYMERQLDFTLSPKFAGFPALINRMKADGMRVILILDPAISGNETQPYPAFTRGVEDDVFIKYPNDGDIVWGKVWPDFPDVVVNGSLDWDSQVELYRAYVAFPDFFRNSTAKWWKREIEELYNNPQNPERSLKFDGMWIDMNEPSSFVNGAVSPGCRDASLNHPPYMPYLESRDRGLSSKTLCMESQQILPDGSPVQHYNVHNLYGWSQTRPTYEAVQEVTGQRGVVITRSTFPSSGRWAGHWLGDNTAAWDQLKKSIIGMMEFSLFGISYTGADICGFFQDAEYEMCVRWMQLGAFYPFSRNHNTIGTRRQDPVSWDVAFVNISRTVLQTRYTLLPYLYTLMHKAHTEGVTVVRPLLHEFVSDQVTWDIDSQFLLGPAFLVSPVLERNARNVTAYFPRARWYDYYTGVDINARGEWKTLPAPLDHINLHVRGGYILPWQEPALNTHLSRQKFMGFKIALDDEGTAGGWLFWDDGQSIDTYGKGLYYLASFSASQNTMQSHIIFNNYITGTNPLKLGYIEIWGVGSVPVTSVSISVSGMVITPSFNNDPTTQVLSIDVTDRNISLHNFTSLTWISTL

SEQ ID NO: 20328 - protein, 1404 aa, Artificial Sequence
  Synthetic polypeptide
VSTFSPPTHSAADCGLLPSPLTSLIPLWQKAPVTFSLVWPGQTVFPDYTNPNCAVWWTKEFELFHNQVEFDGIWIDMNEVSNFVDGSVSGCSTNNLNNPPFTPRILDGYLFCKTLCMDAVQHWGKQYDIHNLYGYSMAVATAEAAKTVFPNKRSFILTRSTFAGSGKFAAHWLGDNTATWDDLRWSIPGVLEFNLFGIPMVGPDICGFALDTPEELCRRWMQLGAFYPFSRNHNGQGYKDQDPASFGADSLLLNSSRHYLNIRYTLLPYLYTLFFRAHSRGDTVARPLLHEFYEDNSTWDVHQQFLWGPGLLITPVLDEGAEKVMAYVPDAVWYDYETGSQVRWRKQKVEMELPGDKIGLHLRGGYIFPTQQPNTTTLASRKNPLGLIIALDENKEAKGELFWDNGETKDTVANKVYLLCEFSVTQNRLEVNISQSTYKDPNNLAFNEIKILGTEEPSNVTVKHNGVPSQTSPTVTYDSNLKVAIITDIDLLLGEAYTVEWSIKIRDEEKIDCYPDENGASAENCTARGCIWEASNSSGVPFCYFVNDLYSVSDVQYNSHGATADISLKSSVYANAFPSTPVNPLRLDVTYHKNEMLQFKIYDPNKNRYEVPVPLNIPSMPSSTPEGQLYDVLIKKNPFGIEIRRKSTGTIIWDSQLLGFTFSDMFIRISTRLPSKYLYGFGETEHRSYRRDLEWHTWGMFSRDQPPGYKKNSYGVHPYYMGLEEDGSAHGVLLLNSNAMDVTFQPLPALTYRTTGGVLDFYVFLGPTPELVTQQYTELIGRPVMVPYWSLGFQLCRYGYQNDSEIASLYDEMVAAQIPYDVQYSDIDYMERQLDFTLSPKFAGFPALINRMKADGMRVILILDPAISGNETQPYPAFTRGVEDDVFIKYPNDGDIVWGKVWPDFPDVVVNGSLDWDSQVELYRAYVAFPDFFRNSTAKWWKREIEELYNNPQNPERSLKFDGMWIDMNEPSSFVNGAVSPGCRDASLNHPPYMPHLESRDRGLSSKTLCMESQQILPDGSLVQHYNVHNLYGWSQTRPTYEAVQEVTGQRGVVITRSTFPSSGRWAGHWLGDNTAAWDQLKKSIIGMMEFSLFGISYTGADICGFFQDAEYEMCVRWMQLGAFYPFSRNHNTIGTRRQDPVSWDVAFVNISRTVLQTRYTLLPYLYTLMHKAHTEGVTVVRPLLHEFVSDQVTWDIDSQFLLGPAFLVSPVLERNARNVTAYFPRARWYDYYTGVDINARGEWKTLPAPLDHINLHVRGGYILPWQEPALNTHLSRQKFMGFKIALDDEGTAGGWLFWDDGQSIDTYGKGLYYLASFSASQNTMQSHIIFNNYITGTNPLKLGYIEIWGVGSVPVTSVSISVSGMVITPSFNNDPTTQVLSIDVTDRNISLHNFTSLTWISTL

SEQ ID NO: 20329 - protein, 43 aa, Artificial Sequence
  Synthetic polypeptide
YRSGKKHPLLSHWSGLDKLCFLIIPIPTVLFGGQRNLSFFTIK

SEQ ID NO: 20330 - protein, 51 aa, Artificial Sequence
  Synthetic polypeptide
KQNGNEEKMTCFKRDCYRRSKTDLKKLPRMQHRKLNRKQEKITQVLESPSP

SEQ ID NO: 20331 - protein, 111 aa, Artificial Sequence
  Synthetic polypeptide
NAAQKIKQETRKDHTGAGVSQSLRHKVAKKGKDVALRYDPISGHNALYWYRQSLGQGLEFPIYFQGKDAADKSGLPRDRFSAQRSEGSISTLKFQRTQQGDLAVYLCASSS

SEQ ID NO: 20332 - protein, 31 aa, Artificial Sequence
  Synthetic polypeptide
TGNKKRSHRCWSLPVPETQGSKEGKGCSSQI

SEQ ID NO: 20333 - protein, 115 aa, Artificial Sequence
  Synthetic polypeptide
DVPFASCHDSEASPAMWNCPVNAGVTQTPKFHILKTGQSMTLQCAQDMNHGYMSWYRQDPGMGLRLIYYSAAAGTTDKEVPNGYNVSRLNTEDFPLRLVSAAPSRTSVYLCASSY

SEQ ID NO: 20334 - protein, 65 aa, Artificial Sequence
  Synthetic polypeptide
GLPSHVELSSECWCHSDPKIPHPEDRTEHDTAVCPGYEPWIHVLVSTRPRHGAETDLLLSCCWYY

SEQ ID NO: 20335 - protein, 62 aa, Artificial Sequence
  Synthetic polypeptide
TMGASLSHAILMIVNKSHEISWAYQGFPHLLLPHFLLPPPCKMCLLLPAMILRPPQPCGTVQ

SEQ ID NO: 20336 - protein, 116 aa, Artificial Sequence
  Synthetic polypeptide
DVPFASCHDSEASPAMWNCPVNAGVTQTPKFRILKIGQSMTLQCAQDMNHNYMYWYRQDPGMGLKLIYYSVGAGITDKGEVPNGYNVSRSTTEYFPLRLELAAPSQTSVYFCASSY

SEQ ID NO: 20337 - protein, 39 aa, Artificial Sequence
  Synthetic polypeptide
GLPSHVELSSECWCHSDPKIPHPEDRTEHDTAVCPGYEP

SEQ ID NO: 20338 - protein, 62 aa, Artificial Sequence; identical to SEQ ID NO: 20335
  Synthetic polypeptide

SEQ ID NO: 20339 - protein, 116 aa, Artificial Sequence
  Synthetic polypeptide
DVPFASCHDSEASPAMWNCPVNAGVTQTPKFQVLKTGQSMTLQCAQDMNHEYMSWYRQDPGMGLRLIHYSVGAGITDQGEVPNGYNVSRSTTEDFPLRLLSAAPSQTSVYFCASSY

SEQ ID NO: 20340 - protein, 39 aa, Artificial Sequence
  Synthetic polypeptide
GLPSHVELSSECWCHSDPKIPGPEDRTEHDTAVCPGYEP

SEQ ID NO: 20341 - protein, 62 aa, Artificial Sequence; identical to SEQ ID NO: 20335
  Synthetic polypeptide

SEQ ID NO: 20342 - protein, 97 aa, Artificial Sequence
  Synthetic polypeptide
AAGMGRMSGRTSSSSWRGSQSWTSGQGESPHSCLYMEPWPSLWGWMPHSTASWRLLTMAGAGWSWLPTSACSVLPRWGPSCSMRCAGWPEARQAKLG

SEQ ID NO: 20343 - protein, 143 aa, Artificial Sequence
  Synthetic polypeptide
EPEHTAGCEQRVWGGCQAGPAAAPGGDLRAGHQDRGSPLTAACTWSPGLPSGAGCLTQLLPGGCSLWPGPGGPGCPRVPALCSQDGALLAQCGALAGQRPDRQSWGEHKSKRSVSSPIGAWPAMQPGAPSEQRLVCLLLQGVQ

SEQ ID NO: 20344 - protein, 790 aa, Artificial Sequence
  Synthetic polypeptide
GTSPWPVRNQNTQQDVSSGYGEDVRQDQQQLLEGISELDIRTGGVPSQLLVHGALAFPLGLDASLNCFLAAAHYGRGRVVLAAHECLLCAPKMGPFLLNAVRWLARGQTGKVGVNTNLKDLCPLLSEHGLQCSLEPHLNSDLCVYCCKAYSDKEAKQLQEFVAEGGGLLIGGQAWWWASQNPGHCPLAGFPGNIILNCFGLSILPQTLKAGCFPVPTPEMRSYHFRKALSQFQAILNHENGNLEKSCLAKLRVDGAAFLQIPAEGVPAYISLHRLLRKMLRGSGLPAVSRENPVASDSYEAAVLSLATGLAHSGTDCSQLAQGLGTWTCSSSLYPSKHPITVEINGINPESHSVIQVGMQWRDLSSCNLHLLGLSNSSLSASCVAGTTGTRHHAWLIFVFLVEREFHRKGNNDCWVSTGLYLLEGQNAEVSLSEAAASAGLRVQIGCHTDDLTKARKLSRAPVVTHQCWMDRTERSVSCLWGGLLYVIVPKGSQLGPVPVTIRGAVPAPYYKLGKTSLEEWKRQMQENLAPWGELATDNIILTVPTTNLQALKDPEPVLRLWDEMMQAVARLAAEPFPFRRPERIVADVQISAGWMHSGYPIMCHLESVKEIINEMDMRSRGVWGPIHELGHNQQRHGWEFPPHTTEATCNLWSVYVHETVLGIPRAQAHEALSPPERERRIKAHLGKGAPLCDWNVWTALETYLQLQEAFGWEPFTQLFAEYQTLSHLPKDNTGRMNLWVKKFSEKVKKNLVPFFEAWGWPIQKEVADSLASLPEWQENPMQVYLRARK

SEQ ID NO: 20345 - protein, 730 aa, Artificial Sequence
  Synthetic polypeptide
GTSPWPVRNQNTQQDVSSGYGEDVRQDQQQLLEGISELDIRTGGVPSQLLVHGALAFPLGLDASLNCFLAAAHYGRGRVVLAAHECLLCAPKMGPFLLNAVRWLARGQTGKVGVNTNLKDLCPLLSEHGLQCSLEPHLNSDLCVYCCKAYSDKEAKQLQEFVAEGGGLLIGGQAWWWASQNPGHCPLAGFPGNIILNCFGLSILPQTLKAGCFPVPTPEMRSYHFRKALSQFQAILNHENGNLEKSCLAKLRVDGAAFLQIPAEGVPAYISLHRLLRKMLRGSGLPAVSRENPVASDSYEAAVLSLATGLAHSGTDCSQLAQGLGTWTCSSSLYPSKHPITVEINGINPGNNDCWVSTGLYLLEGQNAEVSLSEAAASAGLRVQIGCHTDDLTKARKLSRAPVVTHQCWMDRTERSVSCLWGGLLYVIVPKGSQLGPVPVTIRGAVPAPYYKLGKTSLEEWKRQMQENLAPWGELATDNIILTVPTTNLQALKDPEPVLRLWDEMMQAVARLAAEPFPFRRPERIVADVQISAGWMHSGYPIMCHLESVKEIINEMDMRSRGVWGPIHELGHNQQRHGWEFPPHTTEATCNLWSVYVHETVLGIPRAQAHEALSPPERERRIKAHLGKGAPLCDWNVWTALETYLQLQEAFGWEPFTQLFAEYQTLSHLPKDNTGRMNLWVKKFSEKVKKNLVPFFEAWGWPIQKEVADSLASLPEWQENPMQVYLRARK

SEQ ID NO: 20346 - protein, 656 aa, Artificial Sequence
  Synthetic polypeptide
GTSPWPVRNQNTQQDVSSGYGEDVRQDQQQLLEGISELDIRTGGVPSQLLVHGALAFPLGLDASLNCFLAAAHYGRGRVVLAAHECLLCAPKMGPFLLNAVRWLARGQTGKVGVNTNLKDLCPLLSEHGLQCSLEPHLNSDLCVYCCKAYSDKEAKQLQEFVAEGGGLLIGGQAWWWASQNPGHCPLAGFPGNIILNCFGLSILPQTLKAGCFPVPTPEMRSYHFRKALSQFQAILNHENGNLEKSCLAKLRVDGAAFLQIPAEGVPAYISLHRLLRKMLRGSGLPAVSRENPVASDSYEAAVLSLATGLAHSGTDCSQLAQGLGTWTCSSSLYPSKHPITVEINGINPGNNDCWVSTGLYLLEGQNAEVSLSEAAASAGLRVQIGCHTDDLTKARKLSRAPVVTHQCWMDRTERSVSCLWGGLLYVIVPKGSQLGPVPVTIRGAVPAPYYKLGKTSLEEWKRQMQENLAPWGELATDNIILTVPTTNLQALKDPEPVLRLWDEMMQAVARLAAEPFPFRRPERIVADVQISAGWMHSGYPIMCHLESVKEIINEMDMRSRGVWGPIHELGHNQQRHGWEFPPHTTEATCNLWSVYVHETVLGIPRAQAHEALSPPERERRIKAHLGKGAPLCDWNVWTALETYLQVLSRNSGRRG

SEQ ID NO: 20347 - protein, 97 aa, Artificial Sequence; identical to SEQ ID NO: 20342
  Synthetic polypeptide

SEQ ID NO: 20348 - protein, 143 aa, Artificial Sequence; identical to SEQ ID NO: 20343
  Synthetic polypeptide

SEQ ID NO: 20349 - protein, 790 aa, Artificial Sequence; identical to SEQ ID NO: 20344
  Synthetic polypeptide

SEQ ID NO: 20350 - protein, 730 aa, Artificial Sequence; identical to SEQ ID NO: 20345
  Synthetic polypeptide

SEQ ID NO: 20351 - protein, 656 aa, Artificial Sequence; identical to SEQ ID NO: 20346
  Synthetic polypeptide

SEQ ID NO: 20352 - protein, 197 aa, Artificial Sequence
  Synthetic polypeptide
ASWGQRMKNKFWYFEFGTSETFSATCKKLHESVEIECDGVQIDLINISLEGIAILNIPSMHGGSNLWGESKKRRSHRRIEKKGSDKRTTVTDAKELKFASQDLSDQLLEVVGLEGAMEMGQIYTGLKSAGRRLAQCSCVVIRTSKSLPMQIDGEPWMQTPCTIKITHKNQAPMLMGPPPKTGLFCSLVKRTRNRSKE

SEQ ID NO: 20353 - protein, 166 aa, Artificial Sequence
  Synthetic polypeptide
ASWGQRMKNKFWYFEFGTSETFSATCKKLHESVEIECDGVQIDLINISLEGIAILNIPSMHGGSNLWGESKKRRSHRRIEKKGSDKRTTVTDAKELKFASQDLSDQLLEVVGLEGAMEMGQIYTGLKSAGRRLAQCSCVVIRTSKSLPMQIDGEPWMQTPCTVSTE

SEQ ID NO: 20354 - protein, 16 aa, Artificial Sequence
  Synthetic polypeptide
ILSFLGTKNEEQILVF

SEQ ID NO: 20355 - protein, 8 aa, Artificial Sequence
  Synthetic polypeptide
SELLGDKE

SEQ ID NO: 20356 - protein, 35 aa, Artificial Sequence
  Synthetic polypeptide
MEPGEPTFEFQISHLLAVCPQPRSGGGSRSCWSST

SEQ ID NO: 20357 - protein, 43 aa, Artificial Sequence
  Synthetic polypeptide
PWSQASPRLSFKSPTSWLCVLSQGAAAGAGAAGAVREHRERPQ

SEQ ID NO: 20358 - protein, 86 aa, Artificial Sequence
  Synthetic polypeptide
VSNLPPPGCVSSAKERRREQELLEQYVSTVNDRSDIVDSLDEDRLREQEEDQMLRDMIEKLGLQRKKSKFRLSKIWSPKSKSSPSQ

SEQ ID NO: 20359 - protein, 38 aa, Artificial Sequence
  Synthetic polypeptide
MEPGEPTFEFQISHLLAVCPQPSHCRSGGGSRSCWSST

SEQ ID NO: 20360 - protein, 46 aa, Artificial Sequence
  Synthetic polypeptide
PWSQASPRLSFKSPTSWLCVLSQVTAGAAAGAGAAGAVREHRERPQ

SEQ ID NO: 20361 - protein, 89 aa, Artificial Sequence
  Synthetic polypeptide
VSNLPPPGCVSSAKSLQERRREQELLEQYVSTVNDRSDIVDSLDEDRLREQEEDQMLRDMIEKLGLQRKKSKFRLSKIWSPKSKSSPSQ

SEQ ID NO: 20362 - protein, 93 aa, Artificial Sequence; identical to SEQ ID NO: 3711
  Synthetic polypeptide

SEQ ID NO: 20363 - protein, 33 aa, Artificial Sequence; identical to SEQ ID NO: 6302
  Synthetic polypeptide

SEQ ID NO: 20364 - protein, 599 aa, Artificial Sequence; identical to SEQ ID NO: 1897
  Synthetic polypeptide

SEQ ID NO: 20365 - protein, 328 aa, Artificial Sequence; identical to SEQ ID NO: 2397
  Synthetic polypeptide

SEQ ID NO: 20366 - protein, 982 aa, Artificial Sequence
  Synthetic polypeptide
DVTLLLFAFHHDCEAPPAMWNYGVFGRCQKVPAMDFYRYEVSPVALQRLRVALQKLSGTGFTWQDDYTQYVMDQELADLPKTYLRRPEASSPARPSKHSVGSERRYSREGGAALANALRRHLPFLEALSQAPASDVLARTHTAQDRPPAEGDDRFSESILTYVAHTSALTYPPGSRTQLREDLLPRTLGQLQPDELSPKVDSGVDRHHLMAALSAYAAQRPPAPPGEGSLEPQYLLRAPSRMPRPLLAPAAPQKWPSPLGDSEDPSSTGDGARIHTLLKDLQRQPAEVRGLSGLELDGMAELMAGLMQGVDHGVARGSPGRAALGESGEQADGPKATLRGDSFPDDGVQDDDDRLYQEVHRLSATLGGLLQDHGSRLLPGALPFARPLDMERKKSEHPESSLSSEEETAGVENVKSQTYSKDLLGQQPHSEPGAAAFGELQNQMPGPSKEEQSLPAGAQEALSDGLQLEVQPSEEEARGYIVTDRDPLRPEEGRRLVEDVARLLQVPSSAFADVEVLGPAVTFKVSANVQNVTTEDVEKATVDNKDKLEETSGLKILQTGVGSKSKLKFLPPQAEQEDSTKFIALTLVSLACILGVLLASGLIYCLRHSSQHRLKEKLSGLGGDPGADATAAYQELCRQRMATRPPDRPEGPHTSRISSVSSQFSDGPIPSPSARSSASSWSEEPVQSNMDISTGHMILSYMEDHLKNKNRLEKEWEALCAYQAEPNSSFVAQREENVPKNRSLAVLTYDHSRVLLKAENSHSHSDYINASPIMDHDPRNPAYIATQGPLPATVADFWQMVWESGCVVIVMLTPLAENGVRQCYHYWPDEGSNLYHIYEVNLVSEHIWCEDFLVRSFYLKNLQTNETRTVTQFHFLSWYDRGVPSSSRSLLDFRRKVNKCYRGRSCPIIVHCSDGAGRSGTYVLIDMVLNKMAKGAKEIDIAATLEHLRDQRPGMVQTKEQFEFALTAVAEEVNAILKALPQ

SEQ ID NO: 20367 - protein, 953 aa, Artificial Sequence
  Synthetic polypeptide
DVTLLLFAFHHDCEAPPAMWNYGVFGRCQKVPAMDFYRYEVSPVALQRLRVALQKLSGTGFTWQDDYTQYVMDQELADLPKTYLRRPEASSPARPSKHSVGSERRYSREGGAALANALRRHLPFLEALSQAPASDVLARTHTAQDRPPAEGDDRFSESILTYVAHTSALTYPPGSRTQLREDLLPRTLGQLQPDELSPKVDSGVDRHHLMAALSAYAAQRPPAPPGEGSLEPQYLLRAPSRMPRPLLAPAAPQKWPSPLGDSEDPSSTGDGARIHTLLKDLQRQPAEVRGLSGLELDGMAELMAGLMQGVDHGVARGSPGRAALGESGEQADGPKATLRGDSFPDDGVQDDDDRLYQEVHRLSATLGGLLQDHGSRLLPGALPFARPLDMERKKSEHPESSLSSEEETAGVENVKSQTYSKDLLGQQPHSEPGAAAFGELQNQMPGPSKEEQSLPAGAQEALSDGLQLEVQPSEEEARGYIVTDREVLGPAVTFKVSANVQNVTTEDVEKATVDNKDKLEETSGLKILQTGVGSKSKLKFLPPQAEQEDSTKFIALTLVSLACILGVLLASGLIYCLRHSSQHRLKEKLSGLGGDPGADATAAYQELCRQRMATRPPDRPEGPHTSRISSVSSQFSDGPIPSPSARSSASSWSEEPVQSNMDISTGHMILSYMEDHLKNKNRLEKEWEALCAYQAEPNSSFVAQREENVPKNRSLAVLTYDHSRVLLKAENSHSHSDYINASPIMDHDPRNPAYIATQGPLPATVADFWQMVWESGCVVIVMLTPLAENGVRQCYHYWPDEGSNLYHIYEVNLVSEHIWCEDFLVRSFYLKNLQTNETRTVTQFHFLSWYDRGVPSSSRSLLDFRRKVNKCYRGRSCPIIVHCSDGAGRSGTYVLIDMVLNKMAKGAKEIDIAATLEHLRDQRPGMVQTKEQFEFALTAVAEEVNAILKALPQ

SEQ ID NO: 20368 - protein, 51 aa, Artificial Sequence
  Synthetic polypeptide
GPPSHVELWSVWKVPEGSGNGLLPLRGVARGPAAPARGVAEAFRHRFHVAG

SEQ ID NO: 20369 - protein, 68 aa, Artificial Sequence
  Synthetic polypeptide
LCSSLPSTMIVRPPQPCGIMECLEGARRFRQWTFTATRCRPWPCSACAWRCRSFPAQVSRGRMTILSM

SEQ ID NO: 20370 - protein, 85 aa, Artificial Sequence
  Synthetic polypeptide
IVSPETMETRSVMNLACDGRKHPINSSSLLPGNVSQMECLEGARRFRQWTFTATRCRPWPCSACAWRCRSFPAQVSRGRMTILSM

SEQ ID NO: 20371 - protein, 66 aa, Artificial Sequence
  Synthetic polypeptide
TSHVMEENTPSIQVLYSLEMFLRWSVWKVPEGSGNGLLPLRGVARGPAAPARGVAEAFRHRFHVAG

SEQ ID NO: 20372 - protein, 979 aa, Artificial Sequence
  Synthetic polypeptide
WKKTPHQFKFSTPWKCFSDGVFGRCQKVPAMDFYRYEVSPVALQRLRVALQKLSGTGFTWQDDYTQYVMDQELADLPKTYLRRPEASSPARPSKHSVGSERRYSREGGAALANALRRHLPFLEALSQAPASDVLARTHTAQDRPPAEGDDRFSESILTYVAHTSALTYPPGSRTQLREDLLPRTLGQLQPDELSPKVDSGVDRHHLMAALSAYAAQRPPAPPGEGSLEPQYLLRAPSRMPRPLLAPAAPQKWPSPLGDSEDPSSTGDGARIHTLLKDLQRQPAEVRGLSGLELDGMAELMAGLMQGVDHGVARGSPGRAALGESGEQADGPKATLRGDSFPDDGVQDDDDRLYQEVHRLSATLGGLLQDHGSRLLPGALPFARPLDMERKKSEHPESSLSSEEETAGVENVKSQTYSKDLLGQQPHSEPGAAAFGELQNQMPGPSKEEQSLPAGAQEALSDGLQLEVQPSEEEARGYIVTDRDPLRPEEGRRLVEDVARLLQVPSSAFADVEVLGPAVTFKVSANVQNVTTEDVEKATVDNKDKLEETSGLKILQTGVGSKSKLKFLPPQAEQEDSTKFIALTLVSLACILGVLLASGLIYCLRHSSQHRLKEKLSGLGGDPGADATAAYQELCRQRMATRPPDRPEGPHTSRISSVSSQFSDGPIPSPSARSSASSWSEEPVQSNMDISTGHMILSYMEDHLKNKNRLEKEWEALCAYQAEPNSSFVAQREENVPKNRSLAVLTYDHSRVLLKAENSHSHSDYINASPIMDHDPRNPAYIATQGPLPATVADFWQMVWESGCVVIVMLTPLAENGVRQCYHYWPDEGSNLYHIYEVNLVSEHIWCEDFLVRSFYLKNLQTNETRTVTQFHFLSWYDRGVPSSSRSLLDFRRKVNKCYRGRSCPIIVHCSDGAGRSGTYVLIDMVLNKMAKGAKEIDIAATLEHLRDQRPGMVQTKEQFEFALTAVAEEVNAILKALPQ

SEQ ID NO: 20373 - protein, 950 aa, Artificial Sequence
  Synthetic polypeptide
WKKTPHQFKFSTPWKCFSDGVFGRCQKVPAMDFYRYEVSPVALQRLRVALQKLSGTGFTWQDDYTQYVMDQELADLPKTYLRRPEASSPARPSKHSVGSERRYSREGGAALANALRRHLPFLEALSQAPASDVLARTHTAQDRPPAEGDDRFSESILTYVAHTSALTYPPGSRTQLREDLLPRTLGQLQPDELSPKVDSGVDRHHLMAALSAYAAQRPPAPPGEGSLEPQYLLRAPSRMPRPLLAPAAPQKWPSPLGDSEDPSSTGDGARIHTLLKDLQRQPAEVRGLSGLELDGMAELMAGLMQGVDHGVARGSPGRAALGESGEQADGPKATLRGDSFPDDGVQDDDDRLYQEVHRLSATLGGLLQDHGSRLLPGALPFARPLDMERKKSEHPESSLSSEEETAGVENVKSQTYSKDLLGQQPHSEPGAAAFGELQNQMPGPSKEEQSLPAGAQEALSDGLQLEVQPSEEEARGYIVTDREVLGPAVTFKVSANVQNVTTEDVEKATVDNKDKLEETSGLKILQTGVGSKSKLKFLPPQAEQEDSTKFIALTLVSLACILGVLLASGLIYCLRHSSQHRLKEKLSGLGGDPGADATAAYQELCRQRMATRPPDRPEGPHTSRISSVSSQFSDGPIPSPSARSSASSWSEEPVQSNMDISTGHMILSYMEDHLKNKNRLEKEWEALCAYQAEPNSSFVAQREENVPKNRSLAVLTYDHSRVLLKAENSHSHSDYINASPIMDHDPRNPAYIATQGPLPATVADFWQMVWESGCVVIVMLTPLAENGVRQCYHYWPDEGSNLYHIYEVNLVSEHIWCEDFLVRSFYLKNLQTNETRTVTQFHFLSWYDRGVPSSSRSLLDFRRKVNKCYRGRSCPIIVHCSDGAGRSGTYVLIDMVLNKMAKGAKEIDIAATLEHLRDQRPGMVQTKEQFEFALTAVAEEVNAILKALPQ

SEQ ID NO: 20374 - protein, 673 aa, Artificial Sequence
  Synthetic polypeptide
GPYAEGNKPDTKGQRLHNCTCVSFVGNCEIDLEIKRYFCRAGVKSIQIHGTMRVILEPLIGDMPLVGALSIFFLRKPLLEINWTGLTNLLDVPGLNGLSDTIILDIISNYLVLPNRITVPLVSEVQIAQLRFPVPKGVLRIHFIEAQDLQGKDTYLKGLVKGKSDPYGIIRVGNQIFQSRVIKENLSPKWNEVYEALVYEHPGQELEIELFDEDPDKDDFLGSLMIDLIEVEKERLLDEWFTLDEVPKGKLHLRLEWLTLMPNASNLDKVLTDIKADKDQANDGLSSALLILYLDSARNLPSGKKISSNPNPVVQMSVGHKAQESKIRYKTNEPVWEENFTFFIHNPKRQDLEVEVRDEQHQCSLGNLKVPLSQLLTSEDMTVSQRFQLSNSGPNSTIKMKIALRVLHLEKRERPPDHQHSAQVKRPSVSKEGRKTSIKSHMSGSPGPGGSNTAPSTPVIGGSDKPGMEEKAQPPEAGPQGLHDLGRSSSSLLASPGHISVKEPTPSIASDISLPIATQELRQRLRQLENGTTLGQSPLGQIQLTIRHSSQRNKLIVVVHACRNLIAFSEDGSDPYVRMYLLPDKRRSGRRKTHVSKKTLNPVFDQSFDFSVSLPEVQRRTLDVAVKNSGGFLSKDKGLLGKVLVALASEELAKGWTQWYDLTEDGTRPQAMT

SEQ ID NO: 20375 - protein, 694 aa, Artificial Sequence
  Synthetic polypeptide
GPYAEGNKPDTKGQRLHNCTCVSFVGNCEIDLEIKRYFCRAGVKSIQIHGTMRVILEPLIGDMPLVGALSIFFLRKPLLEINWTGLTNLLDVPGLNGLSDTIILDIISNYLVLPNRITVPLVSEVQIAQLRFPVPKGVLRIHFIEAQDLQGKDTYLKGLVKGKSDPYGIIRVGNQIFQSRVIKENLSPKWNEVYEALVYEHPGQELEIELFDEDPDKDDFLGSLMIDLIEVEKERLLDEWFTLDEVPKGKLHLRLEWLTLMPNASNLDKVLTDIKADKDQANDGLSSALLILYLDSARNLPSNPLEFNPDVLKKTAVQRALKSGKKISSNPNPVVQMSVGHKAQESKIRYKTNEPVWEENFTFFIHNPKRQDLEVEVRDEQHQCSLGNLKVPLSQLLTSEDMTVSQRFQLSNSGPNSTIKMKIALRVLHLEKRERPPDHQHSAQVKRPSVSKEGRKTSIKSHMSGSPGPGGSNTAPSTPVIGGSDKPGMEEKAQPPEAGPQGLHDLGRSSSSLLASPGHISVKEPTPSIASDISLPIATQELRQRLRQLENGTTLGQSPLGQIQLTIRHSSQRNKLIVVVHACRNLIAFSEDGSDPYVRMYLLPDKRRSGRRKTHVSKKTLNPVFDQSFDFSVSLPEVQRRTLDVAVKNSGGFLSKDKGLLGKVLVALASEELAKGWTQWYDLTEDGTRPQAMT

SEQ ID NO: 20376 - protein, 10 aa, Artificial Sequence
  Synthetic polypeptide
LHLCEFCRKL

SEQ ID NO: 20377 - protein, 2 aa, Artificial Sequence
  Synthetic polypeptide
VL

SEQ ID NO: 20378 - protein, 26 aa, Artificial Sequence
  Synthetic polypeptide
GPYAEGNKPDTKGQRLHNCTCFCRKL

SEQ ID NO: 20379 - protein, 686 aa, Artificial Sequence
  Synthetic polypeptide
KHGTPAPGRHMLDLEDLMLKETSQTQRDSVCIIALVFVGNCEIDLEIKRYFCRAGVKSIQIHGTMRVILEPLIGDMPLVGALSIFFLRKPLLEINWTGLTNLLDVPGLNGLSDTIILDIISNYLVLPNRITVPLVSEVQIAQLRFPVPKGVLRIHFIEAQDLQGKDTYLKGLVKGKSDPYGIIRVGNQIFQSRVIKENLSPKWNEVYEALVYEHPGQELEIELFDEDPDKDDFLGSLMIDLIEVEKERLLDEWFTLDEVPKGKLHLRLEWLTLMPNASNLDKVLTDIKADKDQANDGLSSALLILYLDSARNLPSGKKISSNPNPVVQMSVGHKAQESKIRYKTNEPVWEENFTFFIHNPKRQDLEVEVRDEQHQCSLGNLKVPLSQLLTSEDMTVSQRFQLSNSGPNSTIKMKIALRVLHLEKRERPPDHQHSAQVKRPSVSKEGRKTSIKSHMSGSPGPGGSNTAPSTPVIGGSDKPGMEEKAQPPEAGPQGLHDLGRSSSSLLASPGHISVKEPTPSIASDISLPIATQELRQRLRQLENGTTLGQSPLGQIQLTIRHSSQRNKLIVVVHACRNLIAFSEDGSDPYVRMYLLPDKRRSGRRKTHVSKKTLNPVFDQSFDFSVSLPEVQRRTLDVAVKNSGGFLSKDKGLLGKVLVALASEELAKGWTQWYDLTEDGTRPQAMT

SEQ ID NO: 20380 - protein, 707 aa, Artificial Sequence
  Synthetic polypeptide
KHGTPAPGRHMLDLEDLMLKETSQTQRDSVCIIALVFVGNCEIDLEIKRYFCRAGVKSIQIHGTMRVILEPLIGDMPLVGALSIFFLRKPLLEINWTGLTNLLDVPGLNGLSDTIILDIISNYLVLPNRITVPLVSEVQIAQLRFPVPKGVLRIHFIEAQDLQGKDTYLKGLVKGKSDPYGIIRVGNQIFQSRVIKENLSPKWNEVYEALVYEHPGQELEIELFDEDPDKDDFLGSLMIDLIEVEKERLLDEWFTLDEVPKGKLHLRLEWLTLMPNASNLDKVLTDIKADKDQANDGLSSALLILYLDSARNLPSNPLEFNPDVLKKTAVQRALKSGKKISSNPNPVVQMSVGHKAQESKIRYKTNEPVWEENFTFFIHNPKRQDLEVEVRDEQHQCSLGNLKVPLSQLLTSEDMTVSQRFQLSNSGPNSTIKMKIALRVLHLEKRERPPDHQHSAQVKRPSVSKEGRKTSIKSHMSGSPGPGGSNTAPSTPVIGGSDKPGMEEKAQPPEAGPQGLHDLGRSSSSLLASPGHISVKEPTPSIASDISLPIATQELRQRLRQLENGTTLGQSPLGQIQLTIRHSSQRNKLIVVVHACRNLIAFSEDGSDPYVRMYLLPDKRRSGRRKTHVSKKTLNPVFDQSFDFSVSLPEVQRRTLDVAVKNSGGFLSKDKGLLGKVLVALASEELAKGWTQWYDLTEDGTRPQAMT

SEQ ID NO: 20381 - protein, 5 aa, Artificial Sequence
  Synthetic polypeptide
LHLFL

SEQ ID NO: 20382 - protein, 52 aa, Artificial Sequence; identical to SEQ ID NO: 5085
  Synthetic polypeptide

SEQ ID NO: 20383 - protein, 689 aa, Artificial Sequence
  Synthetic polypeptide
EASKGRTTIVVAHRLSTIRSADLIVTLKDGMLAEKGAHAELMAKRGLYYSLVMSQDIKKADEQMESMTYSTERKTNSLPLHSVKSIKSDFIDKAEESTQSKEISLPEVSLLKILKLNKPEWPFVVLGTLASVLNGTVHPVFSIIFAKIITMFGNNDKTTLKHDAEIYSMIFVILGVICFVSYFMQGLFYGRAGEILTMRLRHLAFKAMLYQDIAWFDEKENSTGGLTTILAIDIAQIQGATGSRIGVLTQNATNMGLSVIISFIYGWEMTFLILSIAPVLAVTGMIETAAMTGFANKDKQELKHAGKIATEALENIRTIVSLTREKAFEQMYEEMLQTQHRNTSKKAQIIGSCYAFSHAFIYFAYAAGFRFGAYLIQAGRMTPEGMFIVFTAIAYGAMAIGETLVLAPEYSKAKSGAAHLFALLEKKPNIDSRSQEGKKPDTCEGNLEFREVSFFYPCRPDVFILRGLSLSIERGKTVAFVGSSGCGKSTSVQLLQRLYDPVQGQVLFDGVDAKELNVQWLRSQIAIVPQEPVLFNCSIAENIAYGDNSRVVPLDEIKEAANAANIHSFIEGLPEKYNTQVGLKGAQLSGGQKQRLAIARALLQKPKILLLDEATSALDNDSEKVVQHALDKARTGRTCLVVTHRLSAIQNADLIVVLHNGKIKEQGTHQELLRNRDIYFKLVNAQSVQ

SEQ ID NO: 20384 - protein, 47 aa, Artificial Sequence; identical to SEQ ID NO: 5357
  Synthetic polypeptide

SEQ ID NO: 20385 - protein, 40 aa, Artificial Sequence
  Synthetic polypeptide
DVGRAFAPLPCLGCEERLCPAATPSGRHYQKHLYQIMPQI

SEQ ID NO: 20386 - protein, 414 aa, Artificial Sequence
  Synthetic polypeptide
GAPLPGRDPVWETLPETSLPNYATNLKDKSSLVSSLYKVIQEPQSELLEPVCHQLFEFYRSGEEQLLQFTLQFLPELIWCYLAVSASRNVHSSGCIEALLLGVYNLEIVDKQGHTKVLSFTIPSLSKPSVYHEPSSIGSMALTESALSQHGLSKVVYSGPHPQREMLTAQNRFEVLTFLLLCYNAALTYMPSVSLQSLCQICSRICVCGYPRQHVRKYKGISSRIPVSSGFMVQMLTGIYFAFYNGEWDLAQKALDDIIYRAQLELYPEPLLVANAIKASLPHGPMKSNKEGTRCIQVEITPTSSRISRNAVTSMSIRGHRWKRHEQPDNNNDATELGILVIPEISVTNVAGERTGNGEKGRTLGEIDAQHIQGVQETATDPRTESKGLPEIRRQKSVRKMMEDGINSPGRVQF

SEQ ID NO: 20387 - protein, 516 aa, Artificial Sequence
  Synthetic polypeptide
GAPLPGRDPVWETLPETSLPNYATNLKDKSSLVSSLYKVIQEPQSELLEPVCHQLFEFYRSGEEQLLQFTLQFLPELIWCYLAVSASRNVHSSGCIEALLLGVYNLEIVDKQGHTKVLSFTIPSLSKPSVYHEPSSIGSMALTESALSQHGLSKVVYSGPHPQREMLTAQNRFEVLTFLLLCYNAALTYMPSVSLQSLCQICSRICVCGYPRQHVRKYKGISSRIPVSSGFMVQMLTGIYFAFYNGEWDLAQKALDDIIYRAQLELYPEPLLVANAIKASLPHGPMKSNKEGTRCIQVEITPTSSRISRNAVTSMSIRGHRWKRHGNTELTGQEELMEISEVDEGFYSRAASSTSQSGLSNSSHNCSNKPSIGKNHRRSGGSKTGGKEKETTGESCKDHFARKQTQRAQSENLELLSLKRLTLTTSQSLPKPSSHGLAKTAATVFSKSFEQVSGVTVPHNPSSAVGCGAGTDANRFSACSLQEEKLIYVSERTELPMKHQSGQQRPPSISITLSTD

SEQ ID NO: 20388 - protein, 109 aa, Artificial Sequence
  Synthetic polypeptide
GAPLPGRDPVWETLPETSLPNYATNLKDKSSLVSSLYKVIQEPQSELLEPVCHQLFEFYRSGEEQLLQFTLQFLPELIWCYLAVSASRNVHSSGCIEALLLGVYNLVCI

SEQ ID NO: 20389 - protein, 62 aa, Artificial Sequence
  Synthetic polypeptide
GASLPGRASSEMWGEPLPHCPVWDVRSASARPRPRLGDITRNIFTKLCHKFERQEFFSFISL

SEQ ID NO: 20390 - protein, 467 aa, Artificial Sequence
  Synthetic polypeptide
DVGRAFAPLPCLGCEERLCPAATPSGRKKGSRWCCYSGGSRAASVAVAESLTSRGPAGGAPAAALTLPETSLPNYATNLKDKSSLVSSLYKVIQEPQSELLEPVCHQLFEFYRSGEEQLLQFTLQFLPELIWCYLAVSASRNVHSSGCIEALLLGVYNLEIVDKQGHTKVLSFTIPSLSKPSVYHEPSSIGSMALTESALSQHGLSKVVYSGPHPQREMLTAQNRFEVLTFLLLCYNAALTYMPSVSLQSLCQICSRICVCGYPRQHVRKYKGISSRIPVSSGFMVQMLTGIYFAFYNGEWDLAQKALDDIIYRAQLELYPEPLLVANAIKASLPHGPMKSNKEGTRCIQVEITPTSSRISRNAVTSMSIRGHRWKRHEQPDNNNDATELGILVIPEISVTNVAGERTGNGEKGRTLGEIDAQHIQGVQETATDPRTESKGLPEIRRQKSVRKMMEDGINSPGRVQF

SEQ ID NO: 20391 - protein, 33 aa, Artificial Sequence
  Synthetic polypeptide
GAPLPGRDPVWEEEGEQVVLLLGRKQSSLRRCR

SEQ ID NO: 20392 - protein, 75 aa, Artificial Sequence
  Synthetic polypeptide
GASLPGRASSEMWGEPLPHCPVWDVRSASARPRPRLGGRRGAGGAATREEAEQPPSLSLRASRVEVLQVELRQPP

SEQ ID NO: 20393 - protein, 20 aa, Artificial Sequence
  Synthetic polypeptide
ANYHKDRKPNAACSHSQQLL

SEQ ID NO: 20394 - protein, 311 aa, Artificial Sequence
  Synthetic polypeptide
RMFIAALFTIAKTWNEPKCPSMIDWIKKMWHIYTIEYYAVIKKDEFMSFVGTWMKLETIILSKLSQGQKTKRRMFSFTATTLKSYDSNTPGPAGDNPLELSRIPDENCQINRYGHFQATITIVEGILEVNIIQMTDVLMPVPWPESSLIDFVVTCQGSIPTEVCTIISDPTCEITQNTVCSPVDVDEMCLLTVRRTFNGSGTYCVNLTLGDDTSLALTSTLISVPDRDPASPLRMANSALISVGCLAIFVTVISLLVYKKHKEYNPIENSPGNVVRSKGLSVFLNRAKAVFFPGNQEKDPLLKNQEFKGVS

SEQ ID NO: 20395 - protein, 40 aa, Artificial Sequence
  Synthetic polypeptide
VHVLCRNMDEAGNHHSEQTITRTENQTPHVLIHSNYSKIL

SEQ ID NO: 20396 - protein, 26 aa, Artificial Sequence
  Synthetic polypeptide
ANYHKDRKPNAACSHSQDLLVTTPWS

SEQ ID NO: 20397 - protein, 299 aa, Artificial Sequence
  Synthetic polypeptide
RMFIAALFTIAKTWNEPKCPSMIDWIKKMWHIYTIEYYAVIKKDEFMSFVGTWMKLETIILSKLSQGQKTKRRMFSFTGPAGDNPLELSRIPDENCQINRYGHFQATITIVEGILEVNIIQMTDVLMPVPWPESSLIDFVVTCQGSIPTEVCTIISDPTCEITQNTVCSPVDVDEMCLLTVRRTFNGSGTYCVNLTLGDDTSLALTSTLISVPDRDPASPLRMANSALISVGCLAIFVTVISLLVYKKHKEYNPIENSPGNVVRSKGLSVFLNRAKAVFFPGNQEKDPLLKNQEFKGVS

SEQ ID NO: 20398 - protein, 37 aa, Artificial Sequence
  Synthetic polypeptide
VHVLCRNMDEAGNHHSEQTITRTENQTPHVLIHRTCW

SEQ ID NO: 20399 - protein, 150 aa, Artificial Sequence
  Synthetic polypeptide
PQELKTRLCNMIAPAEAPDAKVRMVIITGPPEAQFKAQGRIYGKIKEENFVSPKEEVKLEAHIRVPSFAAGRVIGKGGKTVNELQNLSSAEVVVPRDQTPDENDQVVVKITGHFYACQVAQRKIQEILTQVKQHQQQKALQSGPPQSRRK

SEQ ID NO: 20400 - protein, 33 aa, Artificial Sequence
  Synthetic polypeptide
SQHFGRPKQANCLTPGAEDQTVQHDCSSGSTRC

SEQ ID NO: 20401 - protein, 17 aa, Artificial Sequence
  Synthetic polypeptide
HSASQMHRRDPLEDFSS

SEQ ID NO: 20402 - protein, 315 aa, Artificial Sequence
  Synthetic polypeptide
VPNTVLPRCTEEIPLKILAHNNFVGRLIGKEGRNLKKIEQDTDTKITISPLQELTLYNPERTITVKGNVETCAKAEEEIMKKIRESYENDIASMNLQAHLIPGLNLNALGLFPPTSGMPPPTSGPPSAMTPPYPQFEQSETETVHLFIPALSVGAIIGKQGQHIKQLSRFAGASIKIAPAEAPDAKVRMVIITGPPEAQFKAQGRIYGKIKEENFVSPKEEVKLEAHIRVPSFAAGRVIGKGGKTVNELQNLSSAEVVVPRDQTPDENDQVVVKITGHFYACQVAQRKIQEILTQVKQHQQQKALQSGPPQSRRK

SEQ ID NO: 20403 - protein, 14 aa, Artificial Sequence
  Synthetic polypeptide
YLTQCFPDAQKRSP

SEQ ID NO: 20404 - protein, 503 aa, Artificial Sequence
  Synthetic polypeptide
GSVLPCYQRPRTMAGVDLLVLDSLLVQYGVVESCEQVNTDSETAVVNVTYSSKDQARQALDKLNGFQLENFTLKVAYIPDEMAAQQNPLQQPRGRRGLGQRGSSRQGSPGSVSKQKPCDLPLRLLVPTQFVGAIIGKEGATIRNITKQTQSKIDVHRKENAGAAEKSITILSTPEGTSAACKSILEIMHKEAQDIKFTEEIPLKILAHNNFVGRLIGKEGRNLKKIEQDTDTKITISPLQELTLYNPERTITVKGNVETCAKAEEEIMKKIRESYENDIASMNLQAHLIPGLNLNALGLFPPTSGMPPPTSGPPSAMTPPYPQFEQSETETVHLFIPALSVGAIIGKQGQHIKQLSRFAGASIKIAPAEAPDAKVRMVIITGPPEAQFKAQGRIYGKIKEENFVSPKEEVKLEAHIRVPSFAAGRVIGKGGKTVNELQNLSSAEVVVPRDQTPDENDQVVVKITGHFYACQVAQRKIQEILTQVKQHQQQKALQSGPPQSRRK

SEQ ID NO: 20405 - protein, 38 aa, Artificial Sequence
  Synthetic polypeptide
LSYDLCLFLPPELRWVGLCPPMLSKTQNNGWCGLAGAG

SEQ ID NO: 20406 - protein, 37 aa, Artificial Sequence
  Synthetic polypeptide
LVSVSPTRAKVGRALSSHVIKDPEQWLVWTCWCWIVY

SEQ ID NO: 20407 - protein, 31 aa, Artificial Sequence
  Synthetic polypeptide
MRSDLELCPSSTTFSLCDLVMGSLNRCWIVY

SEQ ID NO: 20408 - protein, 492 aa, Artificial Sequence
  Synthetic polypeptide
SSYGISEQVLDSLLVQYGVVESCEQVNTDSETAVVNVTYSSKDQARQALDKLNGFQLENFTLKVAYIPDEMAAQQNPLQQPRGRRGLGQRGSSRQGSPGSVSKQKPCDLPLRLLVPTQFVGAIIGKEGATIRNITKQTQSKIDVHRKENAGAAEKSITILSTPEGTSAACKSILEIMHKEAQDIKFTEEIPLKILAHNNFVGRLIGKEGRNLKKIEQDTDTKITISPLQELTLYNPERTITVKGNVETCAKAEEEIMKKIRESYENDIASMNLQAHLIPGLNLNALGLFPPTSGMPPPTSGPPSAMTPPYPQFEQSETETVHLFIPALSVGAIIGKQGQHIKQLSRFAGASIKIAPAEAPDAKVRMVIITGPPEAQFKAQGRIYGKIKEENFVSPKEEVKLEAHIRVPSFAAGRVIGKGGKTVNELQNLSSAEVVVPRDQTPDENDQVVVKITGHFYACQVAQRKIQEILTQVKQHQQQKALQSGPPQSRRK

SEQ ID NO: 20409 - protein, 4 aa, Artificial Sequence
  Synthetic polypeptide
TGAG

SEQ ID NO: 20410 - protein, 3 aa, Artificial Sequence
  Synthetic polypeptide
GAG

SEQ ID NO: 20411 - protein, 486 aa, Artificial Sequence
  Synthetic polypeptide
LEVLDSLLVQYGVVESCEQVNTDSETAVVNVTYSSKDQARQALDKLNGFQLENFTLKVAYIPDEMAAQQNPLQQPRGRRGLGQRGSSRQGSPGSVSKQKPCDLPLRLLVPTQFVGAIIGKEGATIRNITKQTQSKIDVHRKENAGAAEKSITILSTPEGTSAACKSILEIMHKEAQDIKFTEEIPLKILAHNNFVGRLIGKEGRNLKKIEQDTDTKITISPLQELTLYNPERTITVKGNVETCAKAEEEIMKKIRESYENDIASMNLQAHLIPGLNLNALGLFPPTSGMPPPTSGPPSAMTPPYPQFEQSETETVHLFIPALSVGAIIGKQGQHIKQLSRFAGASIKIAPAEAPDAKVRMVIITGPPEAQFKAQGRIYGKIKEENFVSPKEEVKLEAHIRVPSFAAGRVIGKGGKTVNELQNLSSAEVVVPRDQTPDENDQVVVKITGHFYACQVAQRKIQEILTQVKQHQQQKALQSGPPQSRRK

SEQ ID NO: 20412 - protein, 7 aa, Artificial Sequence
  Synthetic polypeptide
MRCWIVY

SEQ ID NO: 20413 - protein, 36 aa, Artificial Sequence
  Synthetic polypeptide
GFGTLTEQLLASLLLSLQVAYRGTSPCDHWSWSRTL

SEQ ID NO: 20414 - protein, 105 aa, Artificial Sequence
  Synthetic polypeptide
LSNYWLRCSSACRWPIVGLHLVITGRGVGLCEIRGQVCKPREWNPGDCTGEGQAEPGGQQPRREPVFIWNPEEAGGGFAAAHQRLCRENNKSEKPCAPAGAGRKE

SEQ ID NO: 20415 - protein, 427 aa, Artificial Sequence
  Synthetic polypeptide
SLVVESDFVKYEGKFANHVSGTLETALGKVKLNLGGSSRVESQSSFGTLRKQEVDLQQLIRDSAERTINLRNPVLQQVLEGRNEVLCVLTQKITTMQKCVISEHMQVEEKCGGIVGIQTKTVQVSATEDGNVTKDSNVVLEIPAATTIAYGVIELYVKLDGQFEFCLLRGKQGGFENKKRIDSVYLDPLVFREFAFIDMPDAAHGISSQDGPLSVLKQATLLLERNFHPFAELPEPQQTALSDIFQAVLFDDELLMVLEPVCDDLVSGLSPTVAVLGELKPRQQQDLVAFLQLVGCSLQGGCPGPEDAGSKQLFMTAYFLVSALAEMPDSAAALLGTCCKLQIIPTLCHLLRALSDDGVSDLEDPTLTPLKDTERFGIVQRLFASADISLERLKSSVKAVILKDSKVFPLLLCITLNGLCALGREHS

SEQ ID NO: 20416 - protein, 71 aa, Artificial Sequence
  Synthetic polypeptide
ACLVEHPCGGLLPALVNPESAFSWVIALVERLARAAHGRPPRRINAAAEQREGIGAWSPDIWNTWSWSRTL

SEQ ID NO: 20417 - protein, 120 aa, Artificial Sequence
  Synthetic polypeptide
LPWWNASPEQRTVGPRGGLTQRLNSGKESALGVQTSGTRGRGVGLCEIRGQVCKPREWNPGDCTGEGQAEPGGQQPRREPVFIWNPEEAGGGFAAAHQRLCRENNKSEKPCAPAGAGRKE

SEQ ID NO: 20418 - protein, 441 aa, Artificial Sequence
  Synthetic polypeptide
TAGRNRRLESRHLEHVVVESDFVKYEGKFANHVSGTLETALGKVKLNLGGSSRVESQSSFGTLRKQEVDLQQLIRDSAERTINLRNPVLQQVLEGRNEVLCVLTQKITTMQKCVISEHMQVEEKCGGIVGIQTKTVQVSATEDGNVTKDSNVVLEIPAATTIAYGVIELYVKLDGQFEFCLLRGKQGGFENKKRIDSVYLDPLVFREFAFIDMPDAAHGISSQDGPLSVLKQATLLLERNFHPFAELPEPQQTALSDIFQAVLFDDELLMVLEPVCDDLVSGLSPTVAVLGELKPRQQQDLVAFLQLVGCSLQGGCPGPEDAGSKQLFMTAYFLVSALAEMPDSAAALLGTCCKLQIIPTLCHLLRALSDDGVSDLEDPTLTPLKDTERFGIVQRLFASADISLERLKSSVKAVILKDSKVFPLLLCITLNGLCALGREHS

SEQ ID NO: 20419 - protein, 14 aa, Artificial Sequence
  Synthetic polypeptide
MRELSVIISKILEH

SEQ ID NO: 20420 - protein, 76 aa, Artificial Sequence
  Synthetic polypeptide
TERVKCYHKQNTGALMPMRLKAQCLTGVEKRFIGCLGNGMKASTVAAAPLLPVYGEQILCRKATSNTIASHSLRWN

SEQ ID NO: 20421 - protein, 21 aa, Artificial Sequence
  Synthetic polypeptide
GGVGEVLPGQLGPDRPAELLS

SEQ ID NO: 20422 - protein, 209 aa, Artificial Sequence
  Synthetic polypeptide
KSEGESVKYFLDNLDRIGQLNYFPSKQDILLARKATKGIVEHDFVIKKIPFKMVDVGGQRSQRQKWFQCFDGITSILFMVSSSEYDQVLMEDRRTNRLVESMNIFETIVNNKLFFNVSIILFLNKMDLLVEKVKTVSIKKHFPDFRGDPHRLEDVQRYLVQCFDRKRRNRSKPLFHHFTTAIDTENVRFVFHAVKDTILQENLKDIMLQ

SEQ ID NO: 20423 - protein, 42 aa, Artificial Sequence
  Synthetic polypeptide
LNWNTDHVIEYCPAVRKAERELSMLTWKEVPDASSEKVRGSR

SEQ ID NO: 20424 - protein, 94 aa, Artificial Sequence
  Synthetic polypeptide
AASLTVGPLTGFLLESTLTVPDRRHLADVPVHLLFVLLLLQVREAHQMETESAAVLSTYSLHTLGPGAQGFLLMHEISLAFLGSILKMRSMGCS

SEQ ID NO: 20425 - protein, 330 aa, Artificial Sequence
  Synthetic polypeptide
EHTHSAGPQAPRRCSCPLAFCIAPSPGSGSTPDGNRKCCRFEHLLIAHPGSRGSRVLVDARDKLGIPWQYSENEKHGMFLMAFENKAGLPVEPATFQLYVPALSALWRDSGIREAFSRRSEFQLGESVKYFLDNLDRIGQLNYFPSKQDILLARKATKGIVEHDFVIKKIPFKMVDVGGQRSQRQKWFQCFDGITSILFMVSSSEYDQVLMEDRRTNRLVESMNIFETIVNNKLFFNVSIILFLNKMDLLVEKVKTVSIKKHFPDFRGDPHRLEDVQRYLVQCFDRKRRNRSKPLFHHFTTAIDTENVRFVFHAVKDTILQENLKDIMLQ

SEQ ID NO: 20426 - protein, 46 aa, Artificial Sequence
  Synthetic polypeptide
LASSLRAHSQCRTAGTSPMFLSTCFLYCSFSRFGKHTRWKPKVLPF

SEQ ID NO: 20427 - protein, 62 aa, Artificial Sequence
  Synthetic polypeptide
AAEGSRVLVDARDKLGIPWQYSENEKHGMFLMAFENKAGLPVEPATFQLYVPALSALWRDSG

SEQ ID NO: 20428 - protein, 281 aa, Artificial Sequence
  Synthetic polypeptide
AAEGSRVLVDARDKLGIPWQYSENEKHGMFLMAFENKAGLPVEPATFQLYVPALSALWRDSGIREAFSRRSEFQLGESVKYFLDNLDRIGQLNYFPSKQDILLARKATKGIVEHDFVIKKIPFKMVDVGGQRSQRQKWFQCFDGITSILFMVSSSEYDQVLMEDRRTNRLVESMNIFETIVNNKLFFNVSIILFLNKMDLLVEKVKTVSIKKHFPDFRGDPHRLEDVQRYLVQCFDRKRRNRSKPLFHHFTTAIDTENVRFVFHAVKDTILQENLKDIMLQ

SEQ ID NO: 20429 - protein, 264 aa, Artificial Sequence
  Synthetic polypeptide
AAEGSRVLVDARDKLGIPWQYSENEKHGMFLMAFENKAGLPVEPATFQLYVPALSALWRDSGIREAFSRRSEFQLNYFPSKQDILLARKATKGIVEHDFVIKKIPFKMVDVGGQRSQRQKWFQCFDGITSILFMVSSSEYDQVLMEDRRTNRLVESMNIFETIVNNKLFFNVSIILFLNKMDLLVEKVKTVSIKKHFPDFRGDPHRLEDVQRYLVQCFDRKRRNRSKPLFHHFTTAIDTENVRFVFHAVKDTILQENLKDIMLQ

SEQ ID NO: 20430 - protein, 6 aa, Artificial Sequence
  Synthetic polypeptide
GLKGSC

SEQ ID NO: 20431 - protein, 35 aa, Artificial Sequence
  Synthetic polypeptide
SQLLERLRAQGFLLMHEISLAFLGSILKMRSMGCS

SEQ ID NO: 20432 - protein, 29 aa, Artificial Sequence
  Synthetic polypeptide
PHKVVRSLKDLSALYAQNLYPQMKWICIL

SEQ ID NO: 20433 - protein, 94 aa, Artificial Sequence
  Synthetic polypeptide
PQGGEVLEGFKCPVCSKFVSSDEMDLHLVMCLTKPRITYNEDVLSKDAGECAICLEELQQGDTIARLPCLCIYHKGCIDEWFEVNRSCPEHPSD

SEQ ID NO: 20434 - protein, 2 aa, Artificial Sequence
  Synthetic polypeptide
RI

SEQ ID NO: 20435 - protein, 5 aa, Artificial Sequence
  Synthetic polypeptide
AHLRI

SEQ ID NO: 20436 - protein, 28 aa, Artificial Sequence
  Synthetic polypeptide
ERVLSTFKDLSALYAQNLYPQMKWICIL

SEQ ID NO: 20437 - protein, 86 aa, Artificial Sequence
  Synthetic polypeptide
GFKCPVCSKFVSSDEMDLHLVMCLTKPRITYNEDVLSKDAGECAICLEELQQGDTIARLPCLCIYHKGCIDEWFEVNRSCPEHPSD

SEQ ID NO: 20438 - protein, 20 aa, Artificial Sequence
  Synthetic polypeptide
GQAQWLTPVIPALWEAERMY

SEQ ID NO: 20439 - protein, 70 aa, Artificial Sequence
  Synthetic polypeptide
PGTVAHTCNPSTLGGREDVLSKDAGECAICLEELQQGDTIARLPCLCIYHKGCIDEWFEVNRSCPEHPSD

SEQ ID NO: 20440 - protein, 12 aa, Artificial Sequence
  Synthetic polypeptide
SQHFGRPRGCTE

SEQ ID NO: 20441 - protein, 2114 aa, Artificial Sequence
  Synthetic polypeptide
DDVAPYFKTEPGLPQIHLEGNRLVLTCLAEGSWPLEFKWMRDDSELTTYSSEYKYIIPSLQKLDAGFYRCVVRNRMGALLQRKSEVQVAYMGSFMDTDQRKTVSQGRAAILNLLPITSYPRPQVTWFREGHKIIPSNRIAITLENQLVILATTTSDAGAYYVQAVNEKNGENKTSPFIHLSIARDVGTPETMAPTIVVPPGNRSVVAGSSETTLECIASARPVEDLSVTWKRNGVRITSGLHSFGRRLTISNPTSADTGPYVCEAALPGSAFEPARATAFLFIIEPPYFTAEPESRISAEVEETVDIGCQAMGVPLPTLQWYKDAISISRLQNPRYKVLASGGLRIQKLRPEDSGIFQCFASNEGGEIQTHTYLDVTNIAPVFTQRPVDTTVTDGMTAILRCEVSGAPKPAITWKRENHILASGSVRIPRFMLLESGGLQIAPVFIQDAGNYTCYAANTEGSLNASATLTVWNRTSIVHPPEDHVVIKGTTATLHCGATHDPRVSLRYVWKKDNVALTPSSTSRIVVEKDGSLLISQTWSGDIGDYSCEIVSEGGNDSRMARLEVIELPHSPQNLLVSPNSSHSHAVVLSWVRPFDGNSPILYYIVELSENNSPWKVHLSNVGPEMTGVTVSGLTPARTYQFRVCAVNEVGRGQYSAETSRLMLPEEPPSAPPKNIVASGRTNQSIMVQWQPPPETEHNGVLRGYILRYRLAGLPGEYQQRNITSPEVNYCLVTDLIIWTQYEIQVAAYNGAGLGVFSRAVTEYTLQGVPTAPPQNVQTEAVNSTTIQFLWNPPPQQFINGINQGYKLLAWPADAPEAVTVVTIAPDFHGVHHGHITNLKKFTAYFTSVLCFTTPGDGPPSTPQLVWTQEDKPGAVGHLSFTEILDTSLKVSWQEPLEKNGIITGYQISWEVYGRNDSRLTHTLNSTTHEYKIQGLSSLTTYTIDVAAVTAVGTGLVTSSTISSGVPPDLPGAPSNLVISNISPRSATLQFRPGYDGKTSISRWIVEGQVGAIGDEEEWVTLYEEENEPDAQMLEIPNLTPYTHYRFRMKQVNIVGPSPYSPSSRVIQTLQAPPDVAPTSVTVRTASETSLRLRWVPLPDSQYNGNPESVGYRIKYWRSDLQSSAVAQVVSDRLEREFTIEELEEWMEYELQMQAFNAVGAGPWSEVVRGRTRESVPSAAPENVSAEAVSSTQILLTWTSVPEQDQNGLILGYKILFRAKDLDPEPRSHIVRGNHTQSALLAGLRKFVLYELQVLAFTRIGNGVPSTPLILERTKDDAPGPPVRLVFPEVRLTSVRIVWQPPEEPNGIILGYQIAYRLASSSPHTFTTVEVGATVRQFTATDLAPESAYIFRLSAKTRQGWGEPLEATVITTEKRERPAPPRELLVPQAEVTARSLRLQWVPGSDGASPIRYFTMQVRELPRGEWQTYSSSISHEATACVVDRLRPFTSYKLRLKATNDIGDSDFSSETEAVTTLQDVPGEPPGSVSATPHTTSSVLIQWQPPRDESLNGLLQGYRIYYRELEYEAGSGTEAKTLKNPIALHAELTAQSSFKTVNSSSTSTMCELTHLKKYRRYEVIMTAYNIIGESPASAPVEVFVGEAAPAMAPQNVQVTPLTASQLEVTWDPPPPESQNGNIQGYKIYYWEADSQNETEKMKVLFLPEPVVRLKNLTSHTKYLVSISAFNAAGDGPKSDPQQGRTHQAAPGAPSFLAFSEITSTTLNVSWGEPAAANGILQGYRVVYEPLAPVQGVSKVVTVEVRGNWQRWLKVRDLTKGVTYFFRVQARTITYGPELQANITAGPAEGSPGSPRDVLVTKSASELTLQWTEGHSGDTPTTGYVIEARPSDEGLWDMFVKDIPRSATSYTLSLDKLRQGVTYEFRVVAVNEAGYGEPSNPSTAVSAQVEAPFYEEWWFLLVMALSSLIVILLVVFALVLHGQNKKYKNCSTGKGISTMEESVTLDNGGFAALELSSRHLNVKSTFSKKNGTRSPPRPSPGGLHYSDEDICNKYNGAVLTESVSLKEKSADASESEATDSDYEDALPKHSFVNHYMSDPTYYNSWKRRAQGRAPAPHRYEAVAGSEAGAQLHPVITTQSAGGVYTPAGPGARTPLTGFSSFV

SEQ ID NO: 20442 - protein, 2094 aa, Artificial Sequence
  Synthetic polypeptide
DDVAPYFKTEPGLPQIHLEGNRLVLTCLAEGSWPLEFKWMRDDSELTTYSSEYKYIIPSLQKLDAGFYRCVVRNRMGALLQRKSEVQVAYMGSFMDTDQRKTVSQGRAAILNLLPITSYPRPQVTWFREGHKIIPSNRIAITLENQLVILATTTSDAGAYYVQAVNEKNGENKTSPFIHLSIARDVGTPETMAPTIVVPPGNRSVVAGSSETTLECIASARPVEDLSVTWKRNGVRITSGLHSFGRRLTISNPTSADTGPYVCEAALPGSAFEPARATAFLFIIEPPYFTAEPESRISAEVEETVDIGCQAMGVPLPTLQWYKDAISISRLQNPRYKVLASGGLRIQKLRPEDSGIFQCFASNEGGEIQTHTYLDVTNIAPVFTQRPVDTTVTDGMTAILRCEVSGAPKPAITWKRENHILASGSVRIPRFMLLESGGLQIAPVFIQDAGNYTCYAANTEGSLNASATLTVWNRTSIVHPPEDHVVIKGTTATLHCGATHDPRVSLRYVWKKDNVALTPSSTSRIVVEKDGSLLISQTWSGDIGDYSCEIVSEGGNDSRMARLEVIELPHSPQNLLVSPNSSHSHAVVLSWVRPFDGNSPILYYIVELSENNSPWKVHLSNVGPEMTGVTVSGLTPARTYQFRVCAVNEVGRGQYSAETSRLMLPEEPPSAPPKNIVASGRTNQSIMVQWQPPPETEHNGVLRGYILRYRLAGLPGEYQQRNITSPEVNYCLVTDLIIWTQYEIQVAAYNGAGLGVFSRAVTEYTLQGVPTAPPQNVQTEAVNSTTIQFLWNPPPQQFINGINQGYKLLAWPADAPEAVTVVTIAPDFHGVHHGHITNLKKFTAYFTSVLCFTTPGDGPPSTPQLVWTQEDKPGAVGHLSFTEILDTSLKVSWQEPLEKNGIITGYQISWEVYGRNDSRLTHTLNSTTHEYKIQGLSSLTTYTIDVAAVTAVGTGLVTSSTISSGVPPDLPGAPSNLVISNISPRSATLQFRPGYDGKTSISRWIVEGQVGAIGDEEEWVTLYEEENEPDAQMLEIPNLTPYTHYRFRMKQVNIVGPSPYSPSSRVIQTLQAPPDVAPTSVTVRTASETSLRLRWVPLPDSQYNGNPESVGYRIKYWRSDLQSSAVAQVVSDRLEREFTIEELEEWMEYELQMQAFNAVGAGPWSEVVRGRTRESVPSAAPENVSAEAVSSTQILLTWTSVPEQDQNGLILGYKILFRAKDLDPEPRSHIVRGNHTQSALLAGLRKFVLYELQVLAFTRIGNGVPSTPLILERTKDDAPGPPVRLVFPEVRLTSVRIVWQPPEEPNGIILGYQIAYRLASSSPHTFTTVEVGATVRQFTATDLAPESAYIFRLSAKTRQGWGEPLEATVITTEKRERPAPPRELLVPQAEVTARSLRLQWVPGSDGASPIRYFTMQVRELPRGEWQTYSSSISHEATACVVDRLRPFTSYKLRLKATNDIGDSDFSSETEAVTTLQDVPGEPPGSVSATPHTTSSVLIQWQPPRDESLNGLLQGYRIYYRELEYEAGSGTEAKTLKNPIALHAELTDLKKYRRYEVIMTAYNIIGESPASAPVEVFVGEAAPAMAPQNVQVTPLTASQLEVTWDPPPPESQNGNIQGYKIYYWEADSQNETEKMKVLFLPEPVVRLKNLTSHTKYLVSISAFNAAGDGPKSDPQQGRTHQAAPGAPSFLAFSEITSTTLNVSWGEPAAANGILQGYRVVYEPLAPVQGVSKVVTVEVRGNWQRWLKVRDLTKGVTYFFRVQARTITYGPELQANITAGPAEGSPGSPRDVLVTKSASELTLQWTEGHSGDTPTTGYVIEARPSDEGLWDMFVKDIPRSATSYTLSLDKLRQGVTYEFRVVAVNEAGYGEPSNPSTAVSAQVEAPFYEEWWFLLVMALSSLIVILLVVFALVLHGQNKKYKNCSTGKGISTMEESVTLDNGGFAALELSSRHLNVKSTFSKKNGTRSPPRPSPGGLHYSDEDICNKYNGAVLTESVSLKEKSADASESEATDSDYEDALPKHSFVNHYMSDPTYYNSWKRRAQGRAPAPHRYEAVAGSEAGAQLHPVITTQSAGGVYTPAGPGARTPLTGFSSFV

SEQ ID NO: 20443 - protein, 11 aa, Artificial Sequence
  Synthetic polypeptide
PSCIRVECGVR

SEQ ID NO: 20444 - protein, 114 aa, Artificial Sequence
  Synthetic polypeptide
VRSEMMLLHILKRSQAYHRSTWKGTALFSPALPKGAGLWSSSGCAMTVSSPPTAANISTLFHLCRSSMLGFTAAWCETEWEHSCKENQKFKSHIWEVSWIRTRGKQFLKDVQRF

SEQ ID NO: 20445 - protein, 38 aa, Artificial Sequence
  Synthetic polypeptide
ESCQPCHGLHADSTWDVGSGQHAVLCQAPPRCLHPDCA

SEQ ID NO: 20446 - protein, 58 aa, Artificial Sequence
  Synthetic polypeptide
FLHFHLRIMSTLPWTSRRLHLGCWLWTTCCTLPSTTKMPTSGLCLRTVVEKTSMNVPL

SEQ ID NO: 20447 - protein, 62 aa, Artificial Sequence
  Synthetic polypeptide
FLHFHLRIMSTLPWTSRRLHLGCWLWTTCCTLPSTTKMPTSGLCLRTVVEKTSMNVPLAAVV

SEQ ID NO: 20448 - protein, 83 aa, Artificial Sequence
  Synthetic polypeptide
GRSQDGRIGTALVYSSQRERRRRRVISAFPSENHVNPAMDFTQTPPGMLALDNMLYFAKHHQDAYIRIVLENSSREDKHECPF

SEQ ID NO: 20449 - protein, 114 aa, Artificial Sequence
  Synthetic polypeptide
GRSQDGRIGTALVYSSQRERRRRRVISAFPSENHVNPAMDFTQTPPGMLALDNMLYFAKHHQDAYIRIVLENSSREDKHECPFGRSSIELTKMLCEILKVGELHHLSPEKFTLP

SEQ ID NO: 20450 - protein, 397 aa, Artificial Sequence
  Synthetic polypeptide
GRSQDGRIGTALVYSSQRERRRRRVISAFPSENHVNPAMDFTQTPPGMLALDNMLYFAKHHQDAYIRIVLENSSREDKHECPFGRSSIELTKMLCEILKVGELPSETCNDFHPMFFTHDRSFEEFFCICIQLLNKTWKEMRATSEDFNKVMQVVKEQVMRALTTKPSSLDQFKSKLQNLSYTEILKIRQSERMNQEDFQSRPILELKEKIQPEILELIKQQRLNRLVEGTCFRKLNARRRQDKFWYCRLSPNHKVLHYGDLEESPQGEVPHDSLQDKLPVADIKAVVTGKDCPHMKEKGALKQNKEVLELAFSILYDSNCQLNFIAPDKHEYCIWTDGLNALLGKDMMSDLTRNDLDTLLSMEIKLRLLDLENIQIPDAPPPIPKEPSNYDFVYDCN

SEQ ID NO: 20451 - protein, 169 aa, Artificial Sequence
  Synthetic polypeptide
ERRGQLGFLGRVGAQQAVKRTHFLHHDLLRSWMNNIEDICLKYSEHQDLCMCFLPHESYEQRKFSSSQKSSNLEGRTKSVTRPTGSSAVITCDLPVENAVYTHWYLHQEGKAPQRLLYYDSYNSRVVLESGISREKYHTYASTGKSLKFILENLIERDSGVYYCATWDR

SEQ ID NO: 20452 - protein, 47 aa, Artificial Sequence
  Synthetic polypeptide
NIPNTRICACVFFPMKAMNSENFPPVRNLPTWKGEQSQSPGQLGHQL

SEQ ID NO: 20453 - protein, 32 aa, Artificial Sequence
  Synthetic polypeptide
TAKIFLQSEIFQLGRENKVSHQANWVISCNHL

SEQ ID NO: 20454 - protein, 10 aa, Artificial Sequence
  Synthetic polypeptide
LGADFKSKRR

SEQ ID NO: 20455 - protein, 69 aa, Artificial Sequence
  Synthetic polypeptide
LQCISLATMSVPAFSASFPPPPPLFPLLPLRQQDQSFLFLLLFSLLNMKMMRMKTFMMIHFHLMTRSRF

SEQ ID NO: 20456 - protein, 44 aa, Artificial Sequence
  Synthetic polypeptide
GQEFETSLGNITRPPSLQYRNEPGVVARACSPSSLGGEGALARV

SEQ ID NO: 20457 - protein, 32 aa, Artificial Sequence
  Synthetic polypeptide
QDPHLYNTEMSQVWWHGPVVPAPWEVKVPLLV

SEQ ID NO: 20458 - protein, 6 aa, Artificial Sequence
  Synthetic polypeptide
RCPCSC

SEQ ID NO: 20459 - protein, 7 aa, Artificial Sequence
  Synthetic polypeptide
ARCPCSC

SEQ ID NO: 20460 - protein, 29 aa, Artificial Sequence
  Synthetic polypeptide
GQEFETSLGNITRPPSLQYRNEPGALARV

SEQ ID NO: 20461 - protein, 17 aa, Artificial Sequence
  Synthetic polypeptide
QDPHLYNTEMSQVPLLV

SEQ ID NO: 20462 - protein, 70 aa, Artificial Sequence
  Synthetic polypeptide
AGHSGSYLQSQHFGRAKRVDHLSPGVKDQPGQHRLTLGSAVAYCTYSLTRDAHGSCLHASTANGSILAGL

SEQ ID NO: 20463 - protein, 12 aa, Artificial Sequence
  Synthetic polypeptide
AQELKTSLGNTG

SEQ ID NO: 20464 - protein, 44 aa, Artificial Sequence
  Synthetic polypeptide
RPAWATQADAGVRRGLLHLQPHPRRSRQLPARLHRQWFHPRRPL

SEQ ID NO: 20465 - protein, 1189 aa, Artificial Sequence
  Synthetic polypeptide
GLLKRTVWFCQGTSNKLTQLGTFEDHFLSLQRMFNNCEVVLGNLEITYVQRNYDLSFLKTIQEVAGYVLIALNTVERIPLENLQIIRGNMYYENSYALAVLSNYDANKTGLKELPMRNLQEILHGAVRFSNNPALCNVESIQWRDIVSSDFLSNMSMDFQNHLGSCQKCDPSCPNGSCWGAGEENCQKLTKIICAQQCSGRCRGKSPSDCCHNQCAAGCTGPRESDCLVCRKFRDEATCKDTCPPLMLYNPTTYQMDVNPEGKYSFGATCVKKCPRNYVVTDHGSCVRACGADSYEMEEDGVRKCKKCEGPCRKVCNGIGIGEFKDSLSINATNIKHFKNCTSISGDLHILPVAFRGDSFTHTPPLDPQELDILKTVKEITGFLLIQAWPENRTDLHAFENLEIIRGRTKQHGQFSLAVVSLNITSLGLRSLKEISDGDVIISGNKNLCYANTINWKKLFGTSGQKTKIISNRGENSCKATGQVCHALCSPEGCWGPEPRDCVSCRNVSRGRECVDKCNLLEGEPREFVENSECIQCHPECLPQAMNITCTGRGPDNCIQCAHYIDGPHCVKTCPAGVMGENNTLVWKYADAGHVCHLCHPNCTYGCTGPGLEGCPTNGPKIPSIATGMVGALLLLLVVALGIGLFMRRRHIVRKRTLRRLLQERELVEPLTPSGEAPNQALLRILKETEFKKIKVLGSGAFGTVYKGLWIPEGEKVKIPVAIKELREATSPKANKEILDEAYVMASVDNPHVCRLLGICLTSTVQLITQLMPFGCLLDYVREHKDNIGSQYLLNWCVQIAKGMNYLEDRRLVHRDLAARNVLVKTPQHVKITDFGLAKLLGAEEKEYHAEGGKVPIKWMALESILHRIYTHQSDVWSYGVTVWELMTFGSKPYDGIPASEISSILEKGERLPQPPICTIDVYMIMVKCWMIDADSRPKFRELIIEFSKMARDPQRYLVIQGDERMHLPSPTDSNFYRALMDEEDMDDVVDADEYLIPQQGFFSSPSTSRTPLLSSLSATSNNSTVACIDRNGLQSCPIKEDSFLQRYSSDPTGALTEDSIDDTFLPVPEYINQSVPKRPAGSVQNPVYHNQPLNPAPSRDPHYQDPHSTAVGNPEYLNTVQPTCVNSTFDSPAHWAQKGSHQISLDNPDYQQDFFPKEAKPNGIFKGSTAENAEYLRVAPQSSEFIGA

SEQ ID NO: 20466 - protein, 636 aa, Artificial Sequence
  Synthetic polypeptide
GLLKRTVWFCQGTSNKLTQLGTFEDHFLSLQRMFNNCEVVLGNLEITYVQRNYDLSFLKTIQEVAGYVLIALNTVERIPLENLQIIRGNMYYENSYALAVLSNYDANKTGLKELPMRNLQEILHGAVRFSNNPALCNVESIQWRDIVSSDFLSNMSMDFQNHLGSCQKCDPSCPNGSCWGAGEENCQKLTKIICAQQCSGRCRGKSPSDCCHNQCAAGCTGPRESDCLVCRKFRDEATCKDTCPPLMLYNPTTYQMDVNPEGKYSFGATCVKKCPRNYVVTDHGSCVRACGADSYEMEEDGVRKCKKCEGPCRKVCNGIGIGEFKDSLSINATNIKHFKNCTSISGDLHILPVAFRGDSFTHTPPLDPQELDILKTVKEITGFLLIQAWPENRTDLHAFENLEIIRGRTKQHGQFSLAVVSLNITSLGLRSLKEISDGDVIISGNKNLCYANTINWKKLFGTSGQKTKIISNRGENSCKATGQVCHALCSPEGCWGPEPRDCVSCRNVSRGRECVDKCNLLEGEPREFVENSECIQCHPECLPQAMNITCTGRGPDNCIQCAHYIDGPHCVKTCPAGVMGENNTLVWKYADAGHVCHLCHPNCTYGCTGPGLEGCPTNGSYIVSHFPRSFYKMSVH

SEQ ID NO: 20467 - protein, 684 aa, Artificial Sequence
  Synthetic polypeptide
GLLKRTVWFCQGTSNKLTQLGTFEDHFLSLQRMFNNCEVVLGNLEITYVQRNYDLSFLKTIQEVAGYVLIALNTVERIPLENLQIIRGNMYYENSYALAVLSNYDANKTGLKELPMRNLQEILHGAVRFSNNPALCNVESIQWRDIVSSDFLSNMSMDFQNHLGSCQKCDPSCPNGSCWGAGEENCQKLTKIICAQQCSGRCRGKSPSDCCHNQCAAGCTGPRESDCLVCRKFRDEATCKDTCPPLMLYNPTTYQMDVNPEGKYSFGATCVKKCPRNYVVTDHGSCVRACGADSYEMEEDGVRKCKKCEGPCRKVCNGIGIGEFKDSLSINATNIKHFKNCTSISGDLHILPVAFRGDSFTHTPPLDPQELDILKTVKEITGFLLIQAWPENRTDLHAFENLEIIRGRTKQHGQFSLAVVSLNITSLGLRSLKEISDGDVIISGNKNLCYANTINWKKLFGTSGQKTKIISNRGENSCKATGQVCHALCSPEGCWGPEPRDCVSCRNVSRGRECVDKCNLLEGEPREFVENSECIQCHPECLPQAMNITCTGRGPDNCIQCAHYIDGPHCVKTCPAGVMGENNTLVWKYADAGHVCHLCHPNCTYGPGNESLKAMLFCLFKLSSCNQSNDGSVSHQSGSPAAQESCLGWIPSLLPSEFQLGWGGCSHLHAWPSASVIITASSCH

SEQ ID NO: 20468 - protein, 607 aa, Artificial Sequence
  Synthetic polypeptide
GLLKRTVWFCQGTSNKLTQLGTFEDHFLSLQRMFNNCEVVLGNLEITYVQRNYDLSFLKTIQEVAGYVLIALNTVERIPLENLQIIRGNMYYENSYALAVLSNYDANKTGLKELPMRNLQEILHGAVRFSNNPALCNVESIQWRDIVSSDFLSNMSMDFQNHLGSCQKCDPSCPNGSCWGAGEENCQKLTKIICAQQCSGRCRGKSPSDCCHNQCAAGCTGPRESDCLVCRKFRDEATCKDTCPPLMLYNPTTYQMDVNPEGKYSFGATCVKKCPRNYVVTDHGSCVRACGADSYEMEEDGVRKCKKCEGPCRKVCNGIGIGEFKDSLSINATNIKHFKNCTSISGDLHILPVAFRGDSFTHTPPLDPQELDILKTVKEITGFLLIQAWPENRTDLHAFENLEIIRGRTKQHGQFSLAVVSLNITSLGLRSLKEISDGDVIISGNKNLCYANTINWKKLFGTSGQKTKIISNRGENSCKATGQVCHALCSPEGCWGPEPRDCVSCRNVSRGRECVDKCNLLEGEPREFVENSECIQCHPECLPQAMNITCTGRGPDNCIQCAHYIDGPHCVKTCPAGVMGENNTLVWKYADAGHVCHLCHPNCTYGS

SEQ ID NO: 20469 - protein, 384 aa, Artificial Sequence
  Synthetic polypeptide
GLLKRTVWFCQGTSNKLTQLGTFEDHFLSLQRMFNNCEVVLGNLEITYVQRNYDLSFLKTIQEVAGYVLIALNTVERIPLENLQIIRGNMYYENSYALAVLSNYDANKTGLKELPMRNLQEILHGAVRFSNNPALCNVESIQWRDIVSSDFLSNMSMDFQNHLGSCQKCDPSCPNGSCWGAGEENCQKLTKIICAQQCSGRCRGKSPSDCCHNQCAAGCTGPRESDCLVCRKFRDEATCKDTCPPLMLYNPTTYQMDVNPEGKYSFGATCVKKCPRNYVVTDHGSCVRACGADSYEMEEDGVRKCKKCEGPCRKVCNGIGIGEFKDSLSINATNIKHFKNCTSISGDLHILPVAFRGDSFTHTPPLDPQELDILKTVKEITGLS

SEQ ID NO: 20470 - protein, 1070 aa, Artificial Sequence
  Synthetic polypeptide
GLLKRTVWFCQGTSNKLTQLGTFEDHFLSLQRMFNNCEVVLGNLEITYVQRNYDLSFLKTIQEVAGYVLIALNTVERIPLENLQIIRGNMYYENSYALAVLSNYDANKTGLKELPMRNLQGQKCDPSCPNGSCWGAGEENCQKLTKIICAQQCSGRCRGKSPSDCCHNQCAAGCTGPRESDCLVCRKFRDEATCKDTCPPLMLYNPTTYQMDVNPEGKYSFGATCVKKCPRNYVVTDHGSCVRACGADSYEMEEDGVRKCKKCEGPCRKVCNGIGIGEFKDSLSINATNIKHFKNCTSISGDLHILPVAFRGDSFTHTPPLDPQELDILKTVKEITGFLLIQAWPENRTDLHAFENLEIIRGRTKQHGQFSLAVVSLNITSLGLRSLKEISDGDVIISGNKNLCYANTINWKKLFGTSGQKTKIISNRGENSCKATGQVCHALCSPEGCWGPEPRDCVSCRNVSRGRECVDKCNLLEGEPREFVENSECIQCHPECLPQAMNITCTGRGPDNCIQCAHYIDGPHCVKTCPAGVMGENNTLVWKYADAGHVCHLCHPNCTYGCTGPGLEGCPTNGPKIPSIATGMVGALLLLLVVALGIGLFMRRRHIVRKRTLRRLLQERELVEPLTPSGEAPNQALLRILKETEFKKIKVLGSGAFGTVYKGLWIPEGEKVKIPVAIKELREATSPKANKEILDEAYVMASVDNPHVCRLLGICLTSTVQLITQLMPFGCLLDYVREHKDNIGSQYLLNWCVQIAKGMNYLEDRRLVHRDLAARNVLVKTPQHVKITDFGLAKLLGAEEKEYHAEGGKVPIKWMALESILHRIYTHQSDVWSYGVTVWELMTFGSKPYDGIPASEISSILEKGERLPQPPICTIDVYMIMVKCWMIDADSRPKFRELIIEFSKMARDPQRYLVIQGDERMHLPSPTDSNFYRALMDEEDMDDVVDADEYLIPQQGFFSSPSTSRTPLLSSLSATSNNSTVACIDRNGLQSCPIKEDSFLQRYSSDPTGALTEDSIDDTFLPVPGEWLVWKQSCSSTSSTHSAAASLQCPSQVLPPASPEGETVADLQTQ

SEQ ID NO: 20471 - protein, 59 aa, Artificial Sequence
  Synthetic polypeptide
HKACSRGQCGFAKARVTSSRSWALLKIIFSASRGCSITVRWSLGIWKLPMCRGIMIFPS

SEQ ID NO: 20472 - protein, 23 aa, Artificial Sequence
  Synthetic polypeptide
TSKLLCCDIRLAQEDSVVLPRHE

SEQ ID NO: 20473 - protein, 97 aa, Artificial Sequence
  Synthetic polypeptide
AKITPLHSSMDNRGTASVLQRRSPNEEYVEVGRLGPSDYFGEIALLLNRPRAATVVARGPLKCVKLDRPRFERVLGPCSEILKRNIQRYNSFISLTV

SEQ ID NO: 20474 - protein, 68 aa, Artificial Sequence
  Synthetic polypeptide
SQLLGRLKQENRLNPGDGGCSEPRSHHCTPAWTTEAPRPCCSAGPPMRSTWRWGAWDPLTTSGRLHCC

SEQ ID NO: 20475 - protein, 33 aa, Artificial Sequence
  Synthetic polypeptide
TREMEVAVSQDHTIALQHGQQRHRVRAAAPVPQ

SEQ ID NO: 20476 - protein, 17 aa, Artificial Sequence
  Synthetic polypeptide
EAEAGESLRTQEAEISG

SEQ ID NO: 20477 - protein, 39 aa, Artificial Sequence
  Synthetic polypeptide
GRRVASNPGGRDFGMNLILKFFKPLLNSMSLLISTLYKP

SEQ ID NO: 20478 - protein, 297 aa, Artificial Sequence
  Synthetic polypeptide
SQLLRRLRQESRFEPRRQRFRDEFNIKVLQAFVELHEFADLNLVQALRQFLWSFRLPGEAQKIDRMMEAFASRYCLCNPGVFQSTDTCYVLSFAIIMLNTSLHNHNVRDKPTAERFIAMNRGINEGGDLPEELLRNLYESIKNEPFKIPEDDGNDLTHTFFNPDREGWLLKLGGRVKTWKRRWFILTDNCLYYFEYTTDKEPRGIIPLENLSIREVEDPRKPNCFELYNPSHKGQVIKACKTEADGRVVEGNHVVYRISAPSPEEKEEWMKSIKASISRDPFYDMLATRKRRIANKK

SEQ ID NO: 20479 - protein, 13 aa, Artificial Sequence
  Synthetic polypeptide
AWEVQVACLKTSH

SEQ ID NO: 20480 - protein, 36 aa, Artificial Sequence
  Synthetic polypeptide
KNTKISREWWCVPVISATREAEAGESLEPGRCRLRA

SEQ ID NO: 20481 - protein, 408 aa, Artificial Sequence
  Synthetic polypeptide
SQLRGRLRQENRLSLGGAGCVPEDLSLEEREELLDIRRRKKELIDDIERLKYEIAEVMTEIDNLTSVEESKTTQRNKQIAMGRKKFNMDPKKGIQFLIENDLLQSSPEDVAQFLYKGEGLNKTVIGDYLGERDEFNIKVLQAFVELHEFADLNLVQALRQFLWSFRLPGEAQKIDRMMEAFASRYCLCNPGVFQSTDTCYVLSFAIIMLNTSLHNHNVRDKPTAERFIAMNRGINEGGDLPEELLRNLYESIKNEPFKIPEDDGNDLTHTFFNPDREGWLLKLGGRVKTWKRRWFILTDNCLYYFEYTTDKEPRGIIPLENLSIREVEDPRKPNCFELYNPSHKGQVIKACKTEADGRVVEGNHVVYRISAPSPEEKEEWMKSIKASISRDPFYDMLATRKRRIANKK

SEQ ID NO: 20482 - protein, 139 aa, Artificial Sequence
  Synthetic polypeptide
AVAPVIPALWEAKDVLTDLSAESEVLDVECEVQDRLAHKGISQAARYVYQRLINDGILSQAFSIAPEYRLVIVGHSLGGGAAALLATMLRAAYPQQSSAGIFSELHRVTRPGEGCDSQAQCDQLGRSEEKNLASGRALQ

SEQ ID NO: 20483 - protein, 109 aa, Artificial Sequence
  Synthetic polypeptide
AVAPVIPALWEAKDVLTDLSAESEVLDVECEVQDRLAHKGISQAARYVYQRLINDGILSQAFSIAPEYRLVIVGHSLGGGAAALLATMLRAAYPQVRCYAFSPPRGLWR

SEQ ID NO: 20484 - protein, 305 aa, Artificial Sequence
  Synthetic polypeptide
AVAPVIPALWEAKDVLTDLSAESEVLDVECEVQDRLAHKGISQAARYVYQRLINDGILSQAFSIAPEYRLVIVGHSLGGGAAALLATMLRAAYPQVRCYAFSPPRGLWSKALQEYSQSFIVSLVLGKDVIPRLSVTNLEDLKRRILRVVAHCNKPKYKILLHGLWYELFGGNPNNLPTELDGGDQEVLTQPLLGEQSLLTRWSPAYSFSSDSPLDSSPKYPPLYPPGRIIHLQEEGASGRFGCCSAAHYSAKWSHEAEFSKILIGPKMLTDHMPDILMRALDSVVSDRAACVSCPAQGVSSVDVA

SEQ ID NO: 20485 - protein, 22 aa, Artificial Sequence
  Synthetic polypeptide
SGACNPSTLGGQGCPYGPVSGE

SEQ ID NO: 20486 - protein, 52 aa, Artificial Sequence
  Synthetic polypeptide
SQHFGRPRMSLRTCQRRVRCWTWSVRCRTAWHTRVFLKLPDTFTNDSSTTGF

SEQ ID NO: 20487 - protein, 143 aa, Artificial Sequence
  Synthetic polypeptide
GGTQWLTPVIPALWEAEDVLTDLSAESEVLDVECEVQDRLAHKGISQAARYVYQRLINDGILSQAFSIAPEYRLVIVGHSLGGGAAALLATMLRAAYPQQSSAGIFSELHRVTRPGEGCDSQAQCDQLGRSEEKNLASGRALQ

SEQ ID NO: 20488 - protein, 113 aa, Artificial Sequence
  Synthetic polypeptide
GGTQWLTPVIPALWEAEDVLTDLSAESEVLDVECEVQDRLAHKGISQAARYVYQRLINDGILSQAFSIAPEYRLVIVGHSLGGGAAALLATMLRAAYPQVRCYAFSPPRGLWR

SEQ ID NO: 20489 - protein, 309 aa, Artificial Sequence
  Synthetic polypeptide
GGTQWLTPVIPALWEAEDVLTDLSAESEVLDVECEVQDRLAHKGISQAARYVYQRLINDGILSQAFSIAPEYRLVIVGHSLGGGAAALLATMLRAAYPQVRCYAFSPPRGLWSKALQEYSQSFIVSLVLGKDVIPRLSVTNLEDLKRRILRVVAHCNKPKYKILLHGLWYELFGGNPNNLPTELDGGDQEVLTQPLLGEQSLLTRWSPAYSFSSDSPLDSSPKYPPLYPPGRIIHLQEEGASGRFGCCSAAHYSAKWSHEAEFSKILIGPKMLTDHMPDILMRALDSVVSDRAACVSCPAQGVSSVDVA

SEQ ID NO: 20490 - protein, 26 aa, Artificial Sequence
  Synthetic polypeptide
RDTVAHTCNPSTLGSRGCPYGPVSGE

SEQ ID NO: 20491 - protein, 52 aa, Artificial Sequence
  Synthetic polypeptide
SQHFGKPRMSLRTCQRRVRCWTWSVRCRTAWHTRVFLKLPDTFTNDSSTTGF

SEQ ID NO: 20492 - protein, 256 aa, Artificial Sequence
  Synthetic polypeptide
GGTQWLTPVIPALWEAEEADLDAELENCHHYMQFAAAAYGWPLYIYRNPLTGLCRIGGDCCRSRTTDYDLVGGDQLNCHFGSILHTTGLQYRDFIHVSFHDKVYELPFLVALDHRKESVVVAVRGTMSLQDVLTDLSAESEVLDVECEVQDRLAHKGISQAARYVYQRLINDGILSQAFSIAPEYRLVIVGHSLGGGAAALLATMLRAAYPQQSSAGIFSELHRVTRPGEGCDSQAQCDQLGRSEEKNLASGRALQ

SEQ ID NO: 20493 - protein, 422 aa, Artificial Sequence
  Synthetic polypeptide
GGTQWLTPVIPALWEAEEADLDAELENCHHYMQFAAAAYGWPLYIYRNPLTGLCRIGGDCCRSRTTDYDLVGGDQLNCHFGSILHTTGLQYRDFIHVSFHDKVYELPFLVALDHRKESVVVAVRGTMSLQDVLTDLSAESEVLDVECEVQDRLAHKGISQAARYVYQRLINDGILSQAFSIAPEYRLVIVGHSLGGGAAALLATMLRAAYPQVRCYAFSPPRGLWSKALQEYSQSFIVSLVLGKDVIPRLSVTNLEDLKRRILRVVAHCNKPKYKILLHGLWYELFGGNPNNLPTELDGGDQEVLTQPLLGEQSLLTRWSPAYSFSSDSPLDSSPKYPPLYPPGRIIHLQEEGASGRFGCCSAAHYSAKWSHEAEFSKILIGPKMLTDHMPDILMRALDSVVSDRAACVSCPAQGVSSVDVA

SEQ ID NO: 20494 - protein, 18 aa, Artificial Sequence
  Synthetic polypeptide
RDTVAHTCNPSTLGSRGS

SEQ ID NO: 20495 - protein, 15 aa, Artificial Sequence
  Synthetic polypeptide
SQHFGKPRKLIWMQN

SEQ ID NO: 20496 - protein, 297 aa, Artificial Sequence
  Synthetic polypeptide
GGTQWLTPVIPALWEAEDTDLVPSDIAAGLALLHQQQDNIRNNQEPAQVVCHAPGSSQEADLDAELENCHHYMQFAAAAYGWPLYIYRNPLTGLCRIGGDCCRSRTTDYDLVGGDQLNCHFGSILHTTGLQYRDFIHVSFHDKVYELPFLVALDHRKESVVVAVRGTMSLQDVLTDLSAESEVLDVECEVQDRLAHKGISQAARYVYQRLINDGILSQAFSIAPEYRLVIVGHSLGGGAAALLATMLRAAYPQQSSAGIFSELHRVTRPGEGCDSQAQCDQLGRSEEKNLASGRALQ

SEQ ID NO: 20497 - protein, 463 aa, Artificial Sequence
  Synthetic polypeptide
GGTQWLTPVIPALWEAEDTDLVPSDIAAGLALLHQQQDNIRNNQEPAQVVCHAPGSSQEADLDAELENCHHYMQFAAAAYGWPLYIYRNPLTGLCRIGGDCCRSRTTDYDLVGGDQLNCHFGSILHTTGLQYRDFIHVSFHDKVYELPFLVALDHRKESVVVAVRGTMSLQDVLTDLSAESEVLDVECEVQDRLAHKGISQAARYVYQRLINDGILSQAFSIAPEYRLVIVGHSLGGGAAALLATMLRAAYPQVRCYAFSPPRGLWSKALQEYSQSFIVSLVLGKDVIPRLSVTNLEDLKRRILRVVAHCNKPKYKILLHGLWYELFGGNPNNLPTELDGGDQEVLTQPLLGEQSLLTRWSPAYSFSSDSPLDSSPKYPPLYPPGRIIHLQEEGASGRFGCCSAAHYSAKWSHEAEFSKILIGPKMLTDHMPDILMRALDSVVSDRAACVSCPAQGVSSVDVA

SEQ ID NO: 20498 - protein, 66 aa, Artificial Sequence
  Synthetic polypeptide
GGTQWLTPVIPALWEAEDTDLVPSDIAAGLALLHQQQDNIRNNQEPAQVVCHAPGSSQLQKQNHRL

SEQ ID NO: 20499 - protein, 106 aa, Artificial Sequence
  Synthetic polypeptide
RDTVAHTCNPSTLGSRGHRSGAQRHCGGPRPASSATGQYQEQPRACPGGLPCPRELPAAEAEPQTMTWSEAISSTVTSAPSCTPQGCSTGTSSTSASMTRFTSCRF

SEQ ID NO: 20500 - protein, 59 aa, Artificial Sequence
  Synthetic polypeptide
RDTVAHTCNPSTLGSRGHRSGAQRHCGGPRPASSATGQYQEQPRACPGGLPCPRELPGS

SEQ ID NO: 20501 - protein, 56 aa, Artificial Sequence
  Synthetic polypeptide
SQHFGKPRTQIWCPATLRRASPCFISNRTISGTTKSLPRWSAMPQGAPRKLIWMQN

SEQ ID NO: 20502 - protein, 98 aa, Artificial Sequence
  Synthetic polypeptide
SQHFGKPRTQIWCPATLRRASPCFISNRTISGTTKSLPRWSAMPQGAPSCRSRTTDYDLVGGDQLNCHFGSILHTTGLQYRDFIHVSFHDKVYELPFL

SEQ ID NO: 20503 - protein, 215 aa, Artificial Sequence
  Synthetic polypeptide
SQHFGKPRTQIWCPATLRRASPCFISNRTISGTTKSLPRWSAMPQGAPSCRSRTTDYDLVGGDQLNCHFGSILHTTGLQYRDFIHVSFHDKVYELPFLVALDHRKESVVVAVRGTMSLQDVLTDLSAESEVLDVECEVQDRLAHKGISQAARYVYQRLINDGILSQAFSIAPEYRLVIVGHSLGGGAAALLATMLRAAYPQVRCYAFSPPRGLWR

SEQ ID NO: 20504 - protein, 411 aa, Artificial Sequence
  Synthetic polypeptide
SQHFGKPRTQIWCPATLRRASPCFISNRTISGTTKSLPRWSAMPQGAPSCRSRTTDYDLVGGDQLNCHFGSILHTTGLQYRDFIHVSFHDKVYELPFLVALDHRKESVVVAVRGTMSLQDVLTDLSAESEVLDVECEVQDRLAHKGISQAARYVYQRLINDGILSQAFSIAPEYRLVIVGHSLGGGAAALLATMLRAAYPQVRCYAFSPPRGLWSKALQEYSQSFIVSLVLGKDVIPRLSVTNLEDLKRRILRVVAHCNKPKYKILLHGLWYELFGGNPNNLPTELDGGDQEVLTQPLLGEQSLLTRWSPAYSFSSDSPLDSSPKYPPLYPPGRIIHLQEEGASGRFGCCSAAHYSAKWSHEAEFSKILIGPKMLTDHMPDILMRALDSVVSDRAACVSCPAQGVSSVDVA

SEQ ID NO: 20505 - protein, 64 aa, Artificial Sequence; identical to SEQ ID NO: 4485
  Synthetic polypeptide

SEQ ID NO: 20506 - protein, 477 aa, Artificial Sequence; identical to SEQ ID NO: 2073
  Synthetic polypeptide

SEQ ID NO: 20507 - protein, 83 aa, Artificial Sequence; identical to SEQ ID NO: 3893
  Synthetic polypeptide

SEQ ID NO: 20508 - protein, 606 aa, Artificial Sequence; identical to SEQ ID NO: 1893
  Synthetic polypeptide

SEQ ID NO: 20509 - protein, 11 aa, Artificial Sequence
  Synthetic polypeptide
SQHFGKPRNDL

SEQ ID NO: 20510 - protein, 29 aa, Artificial Sequence
  Synthetic polypeptide
IENLKRSRSINDIFDAMFPVTHIAGETVI

SEQ ID NO: 20511 - protein, 88 aa, Artificial Sequence
  Synthetic polypeptide
IENLKRSRSINDIFDAMFPVTHIAGETVIQQGNEGDNFYVVDQGEVDVYVNGEWVTNISEGGSFGELALIYGTPRAATVKAKTDLKLW

SEQ ID NO: 20512 - protein, 161 aa, Artificial Sequence
  Synthetic polypeptide
IENLKRSRSINDIFDAMFPVTHIAGETVIQQGNEGDNFYVVDQGEVDVYVNGEWVTNISEGGSFGELALIYGTPRAATVKAKTDLKLWGIDRDSYRRILMGSTLRKRKMYEEFLSKVSILESLEKWERLTVADALEPVQFEDGEKIVVQGEPGDDFYIITE

SEQ ID NO: 20513 - protein, 245 aa, Artificial Sequence
  Synthetic polypeptide
IENLKRSRSINDIFDAMFPVTHIAGETVIQQGNEGDNFYVVDQGEVDVYVNGEWVTNISEGGSFGELALIYGTPRAATVKAKTDLKLWGIDRDSYRRILMGSTLRKRKMYEEFLSKVSILESLEKWERLTVADALEPVQFEDGEKIVVQGEPGDDFYIITEGTASVLQRRSPNEEYVEVGRLGPSDYFGEIALLLNRPRAATVVARGPLKCVKLDRPRFERVLGPCSEILKRNIQRYNSFISLTV

SEQ ID NO: 20514 - protein, 25 aa, Artificial Sequence
  Synthetic polypeptide
RDLEALMTYSMPCSLSLTSLGRLLY

SEQ ID NO: 20515 - protein, 45 aa, Artificial Sequence
  Synthetic polypeptide
RDLEALMTYSMPCSLSLTSLGRLLYSKGMKETTSMSLIKGKWMCT

SEQ ID NO: 20516 - protein, 139 aa, Artificial Sequence
  Synthetic polypeptide
AMITPLHSSLDYRIFSCIIPECLQRAVHGLLHYLFHTRNHTFIVLHLVLQGMVYTEYTWEVFGYCQELELSLHYLLLPYLLLGVNLFFFTLTCGTNPGIITKANELLFLHVYEFDEVMFPKNVRCSTCDLRKPARSKHC

SEQ ID NO: 20517 - protein, 318 aa, Artificial Sequence
  Synthetic polypeptide
AMITPLHSSLDYRIFSCIIPECLQRAVHGLLHYLFHTRNHTFIVLHLVLQGMVYTEYTWEVFGYCQELELSLHYLLLPYLLLGVNLFFFTLTCGTNPGIITKANELLFLHVYEFDEVMFPKNVRCSTCDLRKPARSKHCSVCNWCVHRFDHHCVWVNNCIGAWNIRYFLIYVLTLTASAATVAIVSTTFLVHLVVMSDLYQETYIDDLGHLHVMDTVFLIQYLFLTFPRIVFMLGFVVVLSFLLGGYLLFVLYLAATNQTTNEWYRGDWAWCQRCPLVAWPPSAEPQVHRNIHSHGLRSNLQEIFLPAFPCHERKKQE

SEQ ID NO: 20518 - protein, 84 aa, Artificial Sequence
  Synthetic polypeptide
RVQCLTPVIPLLRKLRQEDPLSQESEVAMSYDHATALQPGLQNIFLYNSRMSSESRAWIASLPFPYEKPHLHCPAPGLARDGLY

SEQ ID NO: 20519 - protein, 15 aa, Artificial Sequence
  Synthetic polypeptide
SRHCTPAWTTEYFPV

SEQ ID NO: 20520 - protein, 13 aa, Artificial Sequence
  Synthetic polypeptide
GLPSHVELLTCKG

SEQ ID NO: 20521 - protein, 98 aa, Artificial Sequence
  Synthetic polypeptide
PCGTFDMQRITLEELKHILYHAFRDHLTMKDIENIIINEEESLNETSGNCQTEFEGVHSQKQNRQTCVRKSLICAFAMAFIISVMLIAANQILRSGME

SEQ ID NO: 20522 - protein, 42 aa, Artificial Sequence
  Synthetic polypeptide
WIYKDESLCTSSLSYLPPYKKSLCSSFVFCHDCEASLAMWNF

SEQ ID NO: 20523 - protein, 89 aa, Artificial Sequence
  Synthetic polypeptide
RKCEIREAFRVLDRDGNGFISKQELGMAMRSLGYMPSEVELAIIMQRLDMDGDGQVDFDEFMTILGPKLVSSEGRDGFLGNTIDSIFWQ

SEQ ID NO: 20524 - protein, 183 aa, Artificial Sequence
  Synthetic polypeptide
RKCEIREAFRVLDRDGNGFISKQELGMAMRSLGYMPSEVELAIIMQRLDMDGDGQVDFDEFMTILGPKLVSSEGRDGFLGNTIDSIFWQFDMQRITLEELKHILYHAFRDHLTMKDIENIIINEEESLNETSGNCQTEFEGVHSQKQNRQTCVRKSLICAFAMAFIISVMLIAANQILRSGME

SEQ ID NO: 20525 - protein, 64 aa, Artificial Sequence
  Synthetic polypeptide
VDKENVKSERPFGFWTGMGTASSPSRSWAWPCALWGTCQARWSWPSSCSAWTWTGMARWILMNS

SEQ ID NO: 20526 - protein, 31 aa, Artificial Sequence
  Synthetic polypeptide
FYMMGKDAVPPCDRRLVVQGELPQPIALCWQ

SEQ ID NO: 20527 - protein, 36 aa, Artificial Sequence
  Synthetic polypeptide
SVTISQHPRMGPSSCRKISSGLPLILHDGKRCRSTM

SEQ ID NO: 20528 - protein, 222 aa, Artificial Sequence
  Synthetic polypeptide
WEKMPFHHVTAGLLYKGNYLNRSLSAGSDSEQLANISVEELDEIREAFRVLDRDGNGFISKQELGMAMRSLGYMPSEVELAIIMQRLDMDGDGQVDFDEFMTILGPKLVSSEGRDGFLGNTIDSIFWQFDMQRITLEELKHILYHAFRDHLTMKDIENIIINEEESLNETSGNCQTEFEGVHSQKQNRQTCVRKSLICAFAMAFIISVMLIAANQILRSGME

SEQ ID NO: 20529 - protein, 74 aa, Artificial Sequence
  Synthetic polypeptide
AKCSGSHLQSQCFGRLRQEDRLRPGVQDQPGPRTAMMMMMSLSPWTETASWMSSLSRWRRFEASLTRSQRTWRR

SEQ ID NO: 20530 - protein, 13 aa, Artificial Sequence
  Synthetic polypeptide
GQEFKTSLGQGQR

SEQ ID NO: 20531 - protein, 309 aa, Artificial Sequence
  Synthetic polypeptide
GQVQWLTPTIPVLWKAEAGGSLEARSSRPAWAKDSDDDDDVAVTVDRDRFMDEFFEQVEEIRGFIDKIAENVEEVKRKHSAILASPNPDEKTKEELEELMSDIKKTANKVRSKLKSIEQSIEQEEGLNRSSADLRIRKTQHSTLSRKFVEVMSEYNATQSDYRERCKGRIQRQLEITGRTTTSEELEDMLESGNPAIFASGIIMDSSISKQALSEIETRHSEIIKLENSIRELHDMFMDMAMLVESQGEMIDRIEYNVEHAVDYVERAVSDTKKAVKYQSKARRKKIMIIICCVILGIVIASTVGGIFA

SEQ ID NO: 20532 - protein, 281 aa, Artificial Sequence
  Synthetic polypeptide
GQVQWLTPTIPVLWKAEAGGSLEARSSRPAWAKDSDDDDDVAVTVDRDRFMDEFFEQVEEIRGFIDKIAENVEEVKRKHSAILASPNPDEKTKEELEELMSDIKKTANKVRSKLKSIEQSIEQEEGLNRSSADLRIRKTQHSTLSRKFVEVMSEYNATQSDYRERCKGRIQRQLEITGRTTTSEELEDMLESGNPAIFASGIIMDSSISKQALSEIETRHSEIIKLENSIRELHDMFMDMAMLVESQPQGAFLKSCPEPQPNPEEGALWSSGAPGPAGRDD

SEQ ID NO: 20533 - protein, 272 aa, Artificial Sequence
  Synthetic polypeptide
GQVQWLTPTIPVLWKAEAGGSLEARSSRPAWAKDSDDDDDVAVTVDRDRFMDEFFEQVEEIRGFIDKIAENVEEVKRKHSAILASPNPDEKTKEELEELMSDIKKTANKVRSKLKSIEQSIEQEEGLNRSSADLRIRKTQHSTLSRKFVEVMSEYNATQSDYRERCKGRIQRQLEITGRTTTSEELEDMLESGNPAIFASGIIMDSSISKQALSEIETRHSEIIKLENSIRELHDMFMDMAMLVESQTMWRGPCLTPRRPSSTRARRAGRKS

SEQ ID NO: 20534 - protein, 301 aa, Artificial Sequence
  Synthetic polypeptide
GQVQWLTPTIPVLWKAEAGGSLEARSSRPAWAKDSDDDDDVAVTVDRDRFMDEFFEQVEEIRGFIDKIAENVEEVKRKHSAILASPNPDEKTKEELEELMSDIKKTANKVRSKLKSIEQSIEQEEGLNRSSADLRIRKTQHSTLSRKFVEVMSEYNATQSDYRERCKGRIQRQLEITGRTTTSEELEDMLESGNPAIFASGIIMDSSISKQALSEIETRHSEIIKLENSIRELHDMFMDMAMLVESQVSAGPPCPPLQPTPAPRAALTSPFLPDTLPCRGGTKFSASGCFPEVLPRAPTQP

SEQ ID NO: 20535 - protein, 398 aa, Artificial Sequence; identical to SEQ ID NO: 2247
  Synthetic polypeptide

SEQ ID NO: 20536 - protein, 30 aa, Artificial Sequence; identical to SEQ ID NO: 6440
  Synthetic polypeptide

SEQ ID NO: 20537 - protein, 7 aa, Artificial Sequence
  Synthetic polypeptide
PGWSQPS

SEQ ID NO: 20538 - protein, 10 aa, Artificial Sequence
  Synthetic polypeptide
EEGKRSKRCW

SEQ ID NO: 20539 - protein, 329 aa, Artificial Sequence
  Synthetic polypeptide
KERGRDRKKEREAKGAGESGKSTIVKQMKIIHEAGYSEEECKQYKAVVYSNTIQSIIAIIRAMGRLKIDFGDSARADDARQLFVLAGAAEEGFMTAELAGVIKRLWKDSGVQACFNRSREYQLNDSAAYYLNDLDRIAQPNYIPTQQDVLRTRVKTTGIVETHFTFKDLHFKMFDVGGQRSERKKWIHCFEGVTAIIFCVALSDYDLVLAEDEEMNRMHESMKLFDSICNNKWFTDTSIILFLNKKDLFEEKIKKSPLTICYPEYAGSNTYEEAAAYIQCQFEDLNKRKDTKEIYTHFTCATDTKNVQFVFDAVTDVIIKNNLKDCGLF

SEQ ID NO: 20540 - protein, 24 aa, Artificial Sequence
  Synthetic polypeptide
RKEGGIGRRKEKQKVLVNLVKVQL

SEQ ID NO: 20541 - protein, 29 aa, Artificial Sequence
  Synthetic polypeptide
GLPTHACCTACGIFRYSDWQDKLFMSLGT

SEQ ID NO: 20542 - protein, 1254 aa, Artificial Sequence
  Synthetic polypeptide
GLPTHACCTACGIFRYSDWQDKLFMSLGTIMAIAHGSGLPLMMIVFGEMTDKFVDTAGNFSFPVNFSLSLLNPGKILEEEMTRYAYYYSGLGAGVLVAAYIQVSFWTLAAGRQIRKIRQKFFHAILRQEIGWFDINDTTELNTRLTDDISKISEGIGDKVGMFFQAVATFFAGFIVGFIRGWKLTLVIMAISPILGLSAAVWAKILSAFSDKELAAYAKAGAVAEEALGAIRTVIAFGGQNKELERYQKHLENAKEIGIKKAISANISMGIAFLLIYASYALAFWYGSTLVISKEYTIGNAMTVFFSILIGAFSVGQAAPCIDAFANARGAAYVIFDIIDNNPKIDSFSERGHKPDSIKGNLEFNDVHFSYPSRANVKILKGLNLKVQSGQTVALVGSSGCGKSTTVQLIQRLYDPDEGTINIDGQDIRNFNVNYLREIIGVVSQEPVLFSTTIAENICYGRGNVTMDEIKKAVKEANAYEFIMKLPQKFDTLVGERGAQLSGGQKQRIAIARALVRNPKILLLDEATSALDTESEAEVQAALDKAREGRTTIVIAHRLSTVRNADVIAGFEDGVIVEQGSHSELMKKEGVYFKLVNMQTSGSQIQSEEFELNDEKAATRMAPNGWKSRLFRHSTQKNLKNSQMCQKSLDVETDGLEANVPPVSFLKVLKLNKTEWPYFVVGTVCAIANGGLQPAFSVIFSEIIAIFGPGDDAVKQQKCNIFSLIFLFLGIISFFTFFLQGFTFGKAGEILTRRLRSMAFKAMLRQDMSWFDDHKNSTGALSTRLATDAAQVQGATGTRLALIAQNIANLGTGIIISFIYGWQLTLLLLAVVPIIAVSGIVEMKLLAGNAKRDKKELEAAGKIATEAIENIRTVVSLTQERKFESMYVEKLYGPYRNSVQKAHIYGITFSISQAFMYFSYAGCFRFGAYLIVNGHMRFRDVILVFSAIVFGAVALGHASSFAPDYAKAKLSAAHLFMLFERQPLIDSYSEEGLKPDKFEGNITFNEVVFNYPTRANVPVLQGLSLEVKKGQTLALVGSSGCGKSTVVQLLERFYDPLAGTVFVDFGFQLLDGQEAKKLNVQWLRAQLGIVSQEPILFDCSIAENIAYGDNSRVVSQDEIVSAAKAANIHPFIETLPHKYETRVGDKGTQLSGGQKQRIAIARALIRQPQILLLDEATSALDTESEKVVQEALDKAREGRTCIVIAHRLSTIQNADLIVVFQNGRVKEHGTHQQLLAQKGIYFSMVSVQAGTQNL

SEQ ID NO: 20543 - protein, 1247 aa, Artificial Sequence
  Synthetic polypeptide
GLPTHACCTACGIFRYSDWQDKLFMSLGTIMAIAHGSGLPLMMIVFGEMTDKFVDTAGNFSFPVNFSLSLLNPGKILEEEMTRYAYYYSGLGAGVLVAAYIQVSFWTLAAGRQIRKIRQKFFHAILRQEIGWFDINDTTELNTRLTDDISKISEGIGDKVGMFFQAVATFFAGFIVGFIRGWKLTLVIMAISPILGLSAAVWAKILSAFSDKELAAYAKAGAVAEEALGAIRTVIAFGGQNKELERYQKHLENAKEIGIKKAISANISMGIAFLLIYASYALAFWYGSTLVISKEYTIGNAMTVFFSILIGAFSVGQAAPCIDAFANARGAAYVIFDIIDNNPKIDSFSERGHKPDSIKGNLEFNDVHFSYPSRANVKILKGLNLKVQSGQTVALVGSSGCGKSTTVQLIQRLYDPDEGTINIDGQDIRNFNVNYLREIIGVVSQEPVLFSTTIAENICYGRGNVTMDEIKKAVKEANAYEFIMKLPQKFDTLVGERGAQLSGGQKQRIAIARALVRNPKILLLDEATSALDTESEAEVQAALDKAREGRTTIVIAHRLSTVRNADVIAGFEDGVIVEQGSHSELMKKEGVYFKLVNMQTSGSQIQSEEFELNDEKAATRMAPNGWKSRLFRHSTQKNLKNSQMCQKSLDVETDGLEANVPPVSFLKVLKLNKTEWPYFVVGTVCAIANGGLQPAFSVIFSEIIAIFGPGDDAVKQQKCNIFSLIFLFLGIISFFTFFLQGFTFGKAGEILTRRLRSMAFKAMLRQDMSWFDDHKNSTGALSTRLATDAAQVQGATGTRLALIAQNIANLGTGIIISFIYGWQLTLLLLAVVPIIAVSGIVEMKLLAGNAKRDKKELEAAGKIATEAIENIRTVVSLTQERKFESMYVEKLYGPYRNSVQKAHIYGITFSISQAFMYFSYAGCFRFGAYLIVNGHMRFRDVILVFSAIVFGAVALGHASSFAPDYAKAKLSAAHLFMLFERQPLIDSYSEEGLKPDKFEGNITFNEVVFNYPTRANVPVLQGLSLEVKKGQTLALVGSSGCGKSTVVQLLERFYDPLAGTVLLDGQEAKKLNVQWLRAQLGIVSQEPILFDCSIAENIAYGDNSRVVSQDEIVSAAKAANIHPFIETLPHKYETRVGDKGTQLSGGQKQRIAIARALIRQPQILLLDEATSALDTESEKVVQEALDKAREGRTCIVIAHRLSTIQNADLIVVFQNGRVKEHGTHQQLLAQKGIYFSMVSVQAGTQNL

SEQ ID NO: 20544 - protein, 1200 aa, Artificial Sequence
  Synthetic polypeptide
GLPTHACCTACGIFRYSDWQDKLFMSLGTIMAIAHGSGLPLMMIVFGEMTDKFVDTAGNFSFPVNFSLSLLNPGKILEEEMTRYAYYYSGLGAGVLVAAYIQVSFWTLAAGRQIRKIRQKFFHAILRQEIGWFDINDTTELNTRLTDDISKISEGIGDKVGMFFQAVATFFAGFIVGFIRGWKLTLVIMAISPILGLSAAVWAKILSAFSDKELAAYAKAGAVAEEALGAIRTVIAFGGQNKELERYQKHLENAKEIGIKKAISANISMGIAFLLIYASYALAFWYGSTLVISKEYTIGNAMTVFFSILIGAFSVGQAAPCIDAFANARGAAYVIFDIIDNNPKIDSFSERGHKPDSIKGNLEFNDVHFSYPSRANVKILKGLNLKVQSGQTVALVGSSGCGKSTTVQLIQRLYDPDEGTINIDGQDIRNFNVNYLREIIGVVSQEPVLFSTTIAENICYGRGNVTMDEIKKAVKEANAYEFIMKLPQKFDTLVGERGAQLSGGQKQRIAIARALVRNPKILLLDEATSALDTESEAEVQAALDKAREGRTTIVIAHRLSTVRNADVIAGFEDGVIVEQGSHSELMKKEGVYFKLVNMQTSGSQIQSEEFELNDEKAATRMAPNGWKSRLFRHSTQKNLKNSQMCQKSLDVETDGLEANVPPVSFLKVLKLNKTEWPYFVVGTVCAIANGGLQPAFSVIFSEIIAIFGPGDDAVKQQKCNIFSLIFLFLGIISFFTFFLQGFTFGKAGEILTRRLRSMAFKAMLRQDMSWFDDHKNSTGALSTRLATDAAQVQGATGTRLALIAQNIANLGTGIIISFIYGWQLTLLLLAVVPIIAVSGIVEMKLLAGNAKRDKKELEAAGKIATEAIENIRTVVSLTQERKFESMYVEKLYGPYRVFSAIVFGAVALGHASSFAPDYAKAKLSAAHLFMLFERQPLIDSYSEEGLKPDKFEGNITFNEVVFNYPTRANVPVLQGLSLEVKKGQTLALVGSSGCGKSTVVQLLERFYDPLAGTVLLDGQEAKKLNVQWLRAQLGIVSQEPILFDCSIAENIAYGDNSRVVSQDEIVSAAKAANIHPFIETLPHKYETRVGDKGTQLSGGQKQRIAIARALIRQPQILLLDEATSALDTESEKVVQEALDKAREGRTCIVIAHRLSTIQNADLIVVFQNGRVKEHGTHQQLLAQKGIYFSMVSVQAGTQNL

SEQ ID NO: 20545 - protein, 59 aa, Artificial Sequence
  Synthetic polypeptide
HFLLPSLSLLPPWEDVLASPSPFCHDYKLPEASPPTPAVQPVEFFDTPIGRINCLCRWV

SEQ ID NO: 20546 - protein, 63 aa, Artificial Sequence
  Synthetic polypeptide
HFLLPSLSLLPPWEDVLASPSPFCHDYKLPEASPPTPAVQPVEFFDTPIGRINCLCRWVPSWP

SEQ ID NO: 20547 - protein, 63 aa, Artificial Sequence
  Synthetic polypeptide
VLARSDCLKVCSTSCFPLSLSCHHGKMFLLPLHPSAMIISFLRPPHPRLLYSLWNFSILRLAG

SEQ ID NO: 20548 - protein, 39 aa, Artificial Sequence; identical to SEQ ID NO: 5809
  Synthetic polypeptide

SEQ ID NO: 20549 - protein, 78 aa, Artificial Sequence; identical to SEQ ID NO: 3993
  Synthetic polypeptide

SEQ ID NO: 20550 - protein, 1303 aa, Artificial Sequence; identical to SEQ ID NO: 1482
  Synthetic polypeptide

SEQ ID NO: 20551 - protein, 1296 aa, Artificial Sequence; identical to SEQ ID NO: 1488
  Synthetic polypeptide

SEQ ID NO: 20552 - protein, 1249 aa, Artificial Sequence; identical to SEQ ID NO: 1500
  Synthetic polypeptide

SEQ ID NO: 20553 - protein, 65 aa, Artificial Sequence; identical to SEQ ID NO: 4395
  Synthetic polypeptide

SEQ ID NO: 20554 - protein, 424 aa, Artificial Sequence
  Synthetic polypeptide
FYKGEFPCICCLACCHVRCPSALPSSSAMIVRPPQLCGTIATEAIENFRTVVSLTQEQKFEHMYAQSLQVPYRNSLRKAHIFGITFSFTQAMMYFSYAGCFRFGAYLVAHKLMSFEDVLLVFSAVVFGAMAVGQVSSFAPDYAKAKISAAHIIMIIEKTPLIDSYSTEGLMPNTLEGNVTFGEVVFNYPTRPDIPVLQGLSLEVKKGQTLALVGSSGCGKSTVVQLLERFYDPLAGKVLLDGKEIKRLNVQWLRAHLGIVSQEPILFDCSIAENIAYGDNSRVVSQEEIVRAAKEANIHAFIESLPNKYSTKVGDKGTQLSGGQKQRIAIARALVRQPHILLLDEATSALDTESEKVVQEALDKAREGRTCIVIAHRLSTIQNADLIVVFQNGRVKEHGTHQQLLAQKGIYFSMVSVQAGTKRQ

SEQ ID NO: 20555 - protein, 13 aa, Artificial Sequence
  Synthetic polypeptide
GLPSYVELSLLKQ

SEQ ID NO: 20556 - protein, 39 aa, Artificial Sequence
  Synthetic polypeptide
RGVPLHMLSCLLPCEMSLCSSFIFRHDCEASPAMWNYRY

SEQ ID NO: 20557 - protein, 11 aa, Artificial Sequence
  Synthetic polypeptide
AFLLVYEQIRM

SEQ ID NO: 20558 - protein, 14 aa, Artificial Sequence
  Synthetic polypeptide
LSCWCMNRLGCELV

SEQ ID NO: 20559 - protein, 75 aa, Artificial Sequence
  Synthetic polypeptide
ISTAAIENTVEERQKTRTTISSSSPTPGCIYPKERKSICGRDTCTPMFIAALFTIVKGKWEVGSSEGDQAAGRRR

SEQ ID NO: 20560 - protein, 93 aa, Artificial Sequence
  Synthetic polypeptide
ISTAAIENTVEERQKTRTTISSSSPTPGCIYPKERKSICGRDTCTPMFIAALFTIVKGKWEVGSSEGDQAAGRRRDTFHSYQGSFSFKRTKTC

SEQ ID NO: 20561 - protein, 41 aa, Artificial Sequence
  Synthetic polypeptide
NYHIIQQSHSWVYLSKGKEINMWKRYLHPHVYCSTVHNSQG

SEQ ID NO: 20562 - protein, 20 aa, Artificial Sequence
  Synthetic polypeptide
SRVNGKLVALKVIRLQEEEG

SEQ ID NO: 20563 - protein, 38 aa, Artificial Sequence
  Synthetic polypeptide
SRVNGKLVALKVIRLQEEEGTPFTAIREASLLKGLKHA

SEQ ID NO: 20564 - protein, 316 aa, Artificial Sequence
  Synthetic polypeptide
SRVNGKLVALKVIRLQEEEGTPFTAIREASLLKGLKHANIVLLHDIIHTKETLTLVFEYVHTDLCQYMDKHPGGLHPDNVKLFLFQLLRGLSYIHQRYILHRDLKPQNLLISDTGELKLADFGLARAKSVPSHTYSNEVVTLWYRPPDVLLGSTEYSTCLDMWGVGCIFVEMIQGVAAFPGMKDIQDQLERIFLVLGTPNEDTWPGVHSLPHFKPERFTLYSSKNLRQAWNKLSYVNHAEDLASKLLQCSPKNRLSAQAALSHEYFSDLPPRLWELTDMSSIFTVPNVRLQPEAGESMRAFGKNNSYGKSLSNSKH

SEQ ID NO: 20565 - protein, 16 aa, Artificial Sequence
  Synthetic polypeptide
DQPGQHTSLLKGLKHA

SEQ ID NO: 20566 - protein, 294 aa, Artificial Sequence
  Synthetic polypeptide
DQPGQHTSLLKGLKHANIVLLHDIIHTKETLTLVFEYVHTDLCQYMDKHPGGLHPDNVKLFLFQLLRGLSYIHQRYILHRDLKPQNLLISDTGELKLADFGLARAKSVPSHTYSNEVVTLWYRPPDVLLGSTEYSTCLDMWGVGCIFVEMIQGVAAFPGMKDIQDQLERIFLVLGTPNEDTWPGVHSLPHFKPERFTLYSSKNLRQAWNKLSYVNHAEDLASKLLQCSPKNRLSAQAALSHEYFSDLPPRLWELTDMSSIFTVPNVRLQPEAGESMRAFGKNNSYGKSLSNSKH

SEQ ID NO: 20567 - protein, 42 aa, Artificial Sequence
  Synthetic polypeptide
QALCYTPVIPACQEAEERGSLEPRSLRPAWAAYFSFKRTKTC

SEQ ID NO: 20568 - protein, 14 aa, Artificial Sequence
  Synthetic polypeptide
TQEFETSLGSILLF

SEQ ID NO: 20569 - protein, 27 aa, Artificial Sequence
  Synthetic polypeptide
PGAVAHTCNPSTLGGQGMEKLRPLAYC

SEQ ID NO: 20570 - protein, 20 aa, Artificial Sequence
  Synthetic polypeptide
RVQWLTPVIPALWEAKVWKS

SEQ ID NO: 20571 - protein, 80 aa, Artificial Sequence
  Synthetic polypeptide
SQHFGRPRYGKVEATRILLEKGKCNPNLLNGQLSSPLHFAAGGGHAEIVQILLNHPETDRHITDQQGRSPLNICEENKQN

SEQ ID NO: 20572 - protein, 414 aa, Artificial Sequence
  Synthetic polypeptide
SQHFGRPRYGKVEATRILLEKGKCNPNLLNGQLSSPLHFAAGGGHAEIVQILLNHPETDRHITDQQGRSPLNICEENKQNNWEEAAKLLKEAINKPYEKVRIYRMDGSYRSVELKHGNNTTVQQIMEGMRLSQETQQYFTIWICSENLSLQLKPYHKPLQHVRDWPEILAELTNLDPQRETPQLFLRRDVRLPLEVEKQIEDPLAILILFDEARYNLLKGFYTAPDAKLITLASLLLQIVYGNYESKKHKQGFLNEENLKSIVPVTKLKSKAPHWTNRILHEYKNLSTSEGVSKEMHHLQRMFLQNCWEIPTYGAAFFTGQIFTKASPSNHKVIPVYVGVNIKGLHLLNMETKALLISLKYGCFMWQLGDTDTCFQIHSMENKMSFIVHTKQAGLVVKLLMKLNGQLMPTERNS

SEQ ID NO: 20573 - protein, 450 aa, Artificial Sequence
  Synthetic polypeptide
ADHLRPGVRDQPAQHTFLLSCADGINGTVNWKTRQANNFIISRKMAAGMKDVYSIFSKVHSDRNVYPSAGVLFVHVLEREYFKGEFPPYPKPGEISNDPITFNTNLMGYPDRPGWLRYIQRTPYSDGVLYGSPTAENVGKPTIIEITAYNRRTFETARHNLIINIMSAEDFPLPYQAEFFIKNMNVEEMLASEVLGDFLGAVKNVWQPERLNAINITSALDRGGRVPLPINDLKEGVYVMVGADVPFSSCLREVENPQNQLRCSQEMEPVITCDKKFRTQFYIDWCKISLVDKTKQVSTYQEVIRGEGILPDGGEYKPPSDSLKSRDYYTDFLITLAVPSAVALVLFLILAYIMCCRREGVEKRNMQTPDIQLVHHSAIQKSTKELRDMSKNREIAWPLSTLPVFHPVTGEIIPPLHTDNYDSTNMPLMQTQQNLPHQTQIPQQQTTGEC

SEQ ID NO: 20574 - protein, 14 aa, Artificial Sequence
  Synthetic polypeptide
GLEFETSLPNILFY

SEQ ID NO: 20575 - protein, 40 aa, Artificial Sequence
  Synthetic polypeptide
GRVQWPTPVIPALWQAEVGGSPEAWSSRPACPTYFFIKLC

SEQ ID NO: 20576 - protein, 412 aa, Artificial Sequence
  Synthetic polypeptide
DSGLQAFELVLEQVYSIFSKVHSDRNVYPSAGVLFVHVLEREYFKGEFPPYPKPGEISNDPITFNTNLMGYPDRPGWLRYIQRTPYSDGVLYGSPTAENVGKPTIIEITAYNRRTFETARHNLIINIMSAEDFPLPYQAEFFIKNMNVEEMLASEVLGDFLGAVKNVWQPERLNAINITSALDRGGRVPLPINDLKEGVYVMVGADVPFSSCLREVENPQNQLRCSQEMEPVITCDKKFRTQFYIDWCKISLVDKTKQVSTYQEVIRGEGILPDGGEYKPPSDSLKSRDYYTDFLITLAVPSAVALVLFLILAYIMCCRREGVEKRNMQTPDIQLVHHSAIQKSTKELRDMSKNREIAWPLSTLPVFHPVTGEIIPPLHTDNYDSTNMPLMQTQQNLPHQTQIPQQQTTGEC

SEQ ID NO: 20577 - protein, 414 aa, Artificial Sequence
  Synthetic polypeptide
DSGLQAFELVLEQVYSIFSKVHSDRNVYPSAGVLFVHVLEREYFKGEFPPYPKPGEISNDPITFNTNLMGYPDRPGWLRYIQRTPYSDGVLYGSPTAENVGKPTIIEITAYNRRTFETARHNLIINIMSAEDFPLPYQAEFFIKNMNVEEMLASEVLGDFLGAVKNVWQPERLNAINITSALDRGGRVPLPINDLKEGVYVMVGADVPFSSCLREVENPQNQLRCSQEMEPVITCDKKFRTQFYIDWCKISLVDKTKQVSTYQEVIRGEGILPDGGEYKPPSDSLKSRDYYTDFLITLAVPSAVALVLFLILAYIMCCRREGVEKRNMQTPDIQLVHHSAIQKSTKELRDMSKNREIAWPLSTLPVFHPVTGEIIPPLHTDNYDSTNMPLMQTQQNLPHQTQIPQQQTTGKWYP

SEQ ID NO: 20578 - protein, 439 aa, Artificial Sequence
  Synthetic polypeptide
DSGLQAFELVLEQVYSIFSKVHSDRNVYPSAGVLFVHVLEREYFKGEFPPYPKPGEISNDPITFNTNLMGYPDRPGWLRYIQRTPYSDGVLYGSPTAENVGKPTIIEITAYNRRTFETARHNLIINIMSAEDFPLPYQAEFFIKNMNVEEMLASEVLGDFLGAVKNVWQPERLNAINITSALDRGGRVPLPINDLKEGVYVMVGADVPFSSCLREVENPQNQLRCSQEMEPVITCDKKFRTQFYIDWCKISLVDKTKQVSTYQEVIRGEGILPDGGEYKPPSDSLKSRDYYTDFLITLAVPSAVALVLFLILAYIMCCRREGVEKRNMQTPDIQLVHHSAIQKSTKELRDMSKNREIAWPLSTLPVFHPVTGEIIPPLHTDNYDSTNMPLMQTQQWSFAPVAQAGVQWSDLGSLQPPPPRNLPHQTQIPQQQTTGKWYP

SEQ ID NO: 20579 - protein, 428 aa, Artificial Sequence
  Synthetic polypeptide
DSGLQAFELVLEQVYSIFSKVHSDRNVYPSAGVLFVHVLEREYFKGEFPPYPKPGEISNDPITFNTNLMGYPDRPGWLRYIQRTPYSDGVLYGSPTAENVGKPTIIEITAYNRRTFETARHNLIINIMSAEDFPLPYQAEFFIKNMNVEEMLASEVLGDFLGAVKNVWQPERLNAINITSALDRGGRVPLPINDLKEGVYVMVGADVPFSSCLREVENPQNQLRCSQEMEPVITCDKKFRTQFYIDWCKISLVDKTKQVSTYQEVIRGEGILPDGGEYKPPSDSLKSRDYYTDFLITLAVPSAVALVLFLILAYIMCCRREGVIQLVHHSAIQKSTKELRDMSKNREIAWPLSTLPVFHPVTGEIIPPLHTDNYDSTNMPLMQTQQNLPHQTQIPQQQTTGDFRLTTFQRFEVNGIPEERKLTEAMNL

SEQ ID NO: 20580 - protein, 405 aa, Artificial Sequence
  Synthetic polypeptide
DSGLQAFELVLEQVYSIFSKVHSDRNVYPSAGVLFVHVLEREYFKGEFPPYPKPGEISNDPITFNTNLMGYPDRPGWLRYIQRTPYSDGVLYGSPTAENVGKPTIIEITAYNRRTFETARHNLIINIMSAEDFPLPYQAEFFIKNMNVEEMLASEVLGDFLGAVKNVWQPERLNAINITSALDRGGRVPLPINDLKEGVYVMVGADVPFSSCLREVENPQNQLRCSQEMEPVITCDKKFRTQFYIDWCKISLVDKTKQVSTYQEVIRGEGILPDGGEYKPPSDSLKSRDYYTDFLITLAVPSAVALVLFLILAYIMCCRREGVIQLVHHSAIQKSTKELRDMSKNREIAWPLSTLPVFHPVTGEIIPPLHTDNYDSTNMPLMQTQQNLPHQTQIPQQQTTGKWYP

SEQ ID NO: 20581 - protein, 65 aa, Artificial Sequence
  Synthetic polypeptide
HLDETLDFRLLSWCWSKCTVFSPRYTPIGMYTHQQVSSLFMFWKENILRGNFHLTQNLARLVMIP

SEQ ID NO: 20582 - protein, 36 aa, Artificial Sequence
  Synthetic polypeptide
VGAGASVQYFLQGTLRSECIPISRCPLCSCFGKRIF

SEQ ID NO: 20583 - protein, 93 aa, Artificial Sequence
  Synthetic polypeptide
DKVVRLSWSRVGPNPTGKARLLREQWIRAKYERQEFIYPEKQEPYSAGYREGFLWKRGRDNGQFLSRKFVLTEREGALKYFNRNDAKEPKAVM

SEQ ID NO: 20584 - protein, 162 aa, Artificial Sequence
  Synthetic polypeptide
DKVVRLSWSRVGPNPTGKARLLREQWIRAKYERQEFIYPEKQEPYSAGYREGFLWKRGRDNGQFLSRKFVLTEREGALKYFNRNDAKEPKAVMKIEHLNATFQPAKIGHPHGLQVTYLKDNSTRNIFIYHEDGKEIVDWFNALRAARFHYLQVAFPGAGDAD

SEQ ID NO: 20585 - protein, 169 aa, Artificial Sequence
  Synthetic polypeptide
DKVVRLSWSRVGPNPTGKARLLREQWIRAKYERQEFIYPEKQEPYSAGYREGFLWKRGRDNGQFLSRKFVLTEREGALKYFNRNDAKEPKAVMKIEHLNATFQPAKIGHPHGLQVTYLKDNSTRNIFIYHEDGKEIVDWFNALRAARFHYLQVAFPGAGDADLVPKLSR

SEQ ID NO: 20586 - protein, 191 aa, Artificial Sequence
  Synthetic polypeptide
DKVVRLSWSRVGPNPTGKARLLREQWIRAKYERQEFIYPEKQEPYSAGYREGFLWKRGRDNGQFLSRKFVLTEREGALKYFNRNDAKEPKAVMKIEHLNATFQPAKIGHPHGLQVTYLKDNSTRNIFIYHEDGKEIVDWFNALRAARFHYLQVAFPGAGDADLVPKLSRNYLKEGYMEKTGPKQTEGFRKR

SEQ ID NO: 20587 - protein, 292 aa, Artificial Sequence
  Synthetic polypeptide
DKVVRLSWSRVGPNPTGKARLLREQWIRAKYERQEFIYPEKQEPYSAGYREGFLWKRGRDNGQFLSRKFVLTEREGALKYFNRNDAKEPKAVMKIEHLNATFQPAKIGHPHGLQVTYLKDNSTRNIFIYHEDGKEIVDWFNALRAARFHYLQVAFPGAGDADLVPKLSRNYLKEGYMEKTGPKQTEGFRKRWFTMDDRRLMYFKDPLDAFARGEVFIGSKESGYTVLHGFPPSTQGHHWPHGITIVTPDRKFLFACETESDQREWVAAFQKAVDRPMLPQEYAVEAHFKHKP

SEQ ID NO: 20588 - protein, 60 aa, Artificial Sequence
  Synthetic polypeptide
GCPGVGWAQTPQGRPGSFESSGSGPSTSDRSSSTRRSRSPTRQGTVRVFSGSVAGTTGSF

SEQ ID NO: 20589 - protein, 40 aa, Artificial Sequence
  Synthetic polypeptide
GGPKPHREGQAPSRAVDPGQVRATGVHLPGEAGALLGRVP

SEQ ID NO: 20590 - protein, 53 aa, Artificial Sequence
  Synthetic polypeptide
DPVSKRKKSSFESSGSGPSTSDRSSSTRRSRSPTRQGTVRVFSGSVAGTTGSF

SEQ ID NO: 20591 - protein, 77 aa, Artificial Sequence
  Synthetic polypeptide
KKEKLLREQWIRAKYERQEFIYPEKQEPYSAGYREGFLWKRGRDNGQFLSRKFVLTEREGALKYFNRNDAKEPKAVM

SEQ ID NO: 20592 - protein, 146 aa, Artificial Sequence
  Synthetic polypeptide
KKEKLLREQWIRAKYERQEFIYPEKQEPYSAGYREGFLWKRGRDNGQFLSRKFVLTEREGALKYFNRNDAKEPKAVMKIEHLNATFQPAKIGHPHGLQVTYLKDNSTRNIFIYHEDGKEIVDWFNALRAARFHYLQVAFPGAGDAD

SEQ ID NO: 20593 - protein, 153 aa, Artificial Sequence
  Synthetic polypeptide
KKEKLLREQWIRAKYERQEFIYPEKQEPYSAGYREGFLWKRGRDNGQFLSRKFVLTEREGALKYFNRNDAKEPKAVMKIEHLNATFQPAKIGHPHGLQVTYLKDNSTRNIFIYHEDGKEIVDWFNALRAARFHYLQVAFPGAGDADLVPKLSR

SEQ ID NO: 20594 - protein, 175 aa, Artificial Sequence
  Synthetic polypeptide
KKEKLLREQWIRAKYERQEFIYPEKQEPYSAGYREGFLWKRGRDNGQFLSRKFVLTEREGALKYFNRNDAKEPKAVMKIEHLNATFQPAKIGHPHGLQVTYLKDNSTRNIFIYHEDGKEIVDWFNALRAARFHYLQVAFPGAGDADLVPKLSRNYLKEGYMEKTGPKQTEGFRKR

SEQ ID NO: 20595 - protein, 276 aa, Artificial Sequence
  Synthetic polypeptide
KKEKLLREQWIRAKYERQEFIYPEKQEPYSAGYREGFLWKRGRDNGQFLSRKFVLTEREGALKYFNRNDAKEPKAVMKIEHLNATFQPAKIGHPHGLQVTYLKDNSTRNIFIYHEDGKEIVDWFNALRAARFHYLQVAFPGAGDADLVPKLSRNYLKEGYMEKTGPKQTEGFRKRWFTMDDRRLMYFKDPLDAFARGEVFIGSKESGYTVLHGFPPSTQGHHWPHGITIVTPDRKFLFACETESDQREWVAAFQKAVDRPMLPQEYAVEAHFKHKP

SEQ ID NO: 20596 - protein, 61 aa, Artificial Sequence
  Synthetic polypeptide
VQVLEAALSCDRTTVPQPGRHSETLSLKERKAPSRAVDPGQVRATGVHLPGEAGALLGRVP

SEQ ID NO: 20597 - protein, 105 aa, Artificial Sequence
  Synthetic polypeptide
AGREAHTCNRSPVGGPGGRIGLRSSRPAWATELLREQWIRAKYERQEFIYPEKQEPYSAGYREGFLWKRGRDNGQFLSRKFVLTEREGALKYFNRNDAKEPKAVM

SEQ ID NO: 20598 - protein, 174 aa, Artificial Sequence
  Synthetic polypeptide
AGREAHTCNRSPVGGPGGRIGLRSSRPAWATELLREQWIRAKYERQEFIYPEKQEPYSAGYREGFLWKRGRDNGQFLSRKFVLTEREGALKYFNRNDAKEPKAVMKIEHLNATFQPAKIGHPHGLQVTYLKDNSTRNIFIYHEDGKEIVDWFNALRAARFHYLQVAFPGAGDAD

SEQ ID NO: 20599 - protein, 181 aa, Artificial Sequence
  Synthetic polypeptide
AGREAHTCNRSPVGGPGGRIGLRSSRPAWATELLREQWIRAKYERQEFIYPEKQEPYSAGYREGFLWKRGRDNGQFLSRKFVLTEREGALKYFNRNDAKEPKAVMKIEHLNATFQPAKIGHPHGLQVTYLKDNSTRNIFIYHEDGKEIVDWFNALRAARFHYLQVAFPGAGDADLVPKLSR

SEQ ID NO: 20600 - protein, 203 aa, Artificial Sequence
  Synthetic polypeptide
AGREAHTCNRSPVGGPGGRIGLRSSRPAWATELLREQWIRAKYERQEFIYPEKQEPYSAGYREGFLWKRGRDNGQFLSRKFVLTEREGALKYFNRNDAKEPKAVMKIEHLNATFQPAKIGHPHGLQVTYLKDNSTRNIFIYHEDGKEIVDWFNALRAARFHYLQVAFPGAGDADLVPKLSRNYLKEGYMEKTGPKQTEGFRKR

SEQ ID NO: 20601 - protein, 304 aa, Artificial Sequence
  Synthetic polypeptide
AGREAHTCNRSPVGGPGGRIGLRSSRPAWATELLREQWIRAKYERQEFIYPEKQEPYSAGYREGFLWKRGRDNGQFLSRKFVLTEREGALKYFNRNDAKEPKAVMKIEHLNATFQPAKIGHPHGLQVTYLKDNSTRNIFIYHEDGKEIVDWFNALRAARFHYLQVAFPGAGDADLVPKLSRNYLKEGYMEKTGPKQTEGFRKRWFTMDDRRLMYFKDPLDAFARGEVFIGSKESGYTVLHGFPPSTQGHHWPHGITIVTPDRKFLFACETESDQREWVAAFQKAVDRPMLPQEYAVEAHFKHKP

SEQ ID NO: 20602 - protein, 63 aa, Artificial Sequence
  Synthetic polypeptide
EAQVGGLASGVPDQPGQQSSFESSGSGPSTSDRSSSTRRSRSPTRQGTVRVFSGSVAGTTGSF

SEQ ID NO: 20603 - protein, 53 aa, Artificial Sequence
  Synthetic polypeptide
SQPCRRPRWEDWPQEFQTSLGNRAPSRAVDPGQVRATGVHLPGEAGALLGRVP

SEQ ID NO: 20604 - protein, 193 aa, Artificial Sequence
  Synthetic polypeptide
GQELETSHGQHGETPSPLKIQKLARLYVNWRFMRGIEAQFLALQKGFNELIPQHLLKPFDQKELELIIGGLDKIDLNDWKSNTRLKHCVADSNIVRWFWQAVETFDEERRARLLQFVTGSTRVPLQGFKALQGSTGAAGPRLFTIHLIDANTDNLPKAHTCFNRIDIPPYESYEKLYEKLLTAVEETCGFAVE

SEQ ID NO: 20605 - protein, 35 aa, Artificial Sequence
  Synthetic polypeptide
NPISTKNTKISQVVCKLEVYERNRSPVLSSAEGVQ

SEQ ID NO: 20606 - protein, 4 aa, Artificial Sequence
  Synthetic polypeptide
PGCM

SEQ ID NO: 20607 - protein, 122 aa, Artificial Sequence
  Synthetic polypeptide
DNWRNLNTERCMKTPGLGGRSAASWRNQPLTQIAPVLLLEEGIAGSWSPQVKIKDFRHSGFETLMCEVHYRRPRTDHTATSPRNCPKATNKEQQSRAKFTFCIHRLELARGTTPGYQETLTV

SEQ ID NO: 20608 - protein, 148 aa, Artificial Sequence
  Synthetic polypeptide
DNWRNLNTERCMKTPGLGGRSAASWRNQPLTQIAPVLLLEEGIAGSWSPQVKIKDFRHSGFETLMCEVHYRRPRTDHTATSPRNCPKATNKEQQSRAKFTFCIHRLELARGTTPGYQVPRGPFLGEMQLFYTNSFYKAIHLSPETLTV

SEQ ID NO: 20609 - protein, 582 aa, Artificial Sequence
  Synthetic polypeptide
FMRQLEKSEHRTVYEDSGPGRPLSCFMEEPAPYTDSTGAAAGGGNCRFVESPSQDQRLQAQRLRNPDVRGSLQTPQNRPHGHQSPELPEGYEQRTTVQGQVYFLHTQTGVSTWHDPRIPRDLNSVNCDELGPLPPGWEVRSTVSGRIYFVDHNNRTTQFTDPRLHHIMNHQCQLKEPSQPLPLPSEGSLEDEELPAQRYERDLVQKLKVLRHELSLQQPQAGHCRIEVSREEIFEESYRQIMKMRPKDLKKRLMVKFRGEEGLDYGGVAREWLYLLCHEMLNPYYGLFQYSTDNIYMLQINPDSSINPDHLSYFHFVGRIMGLAVFHGHYINGGFTVPFYKQLLGKPIQLSDLESVDPELHKSLVWILENDITPVLDHTFCVEHNAFGRILQHELKPNGRNVPVTEENKKEYVRLYVNWRFMRGIEAQFLALQKGFNELIPQHLLKPFDQKELELIIGGLDKIDLNDWKSNTRLKHCVADSNIVRWFWQAVETFDEERRARLLQFVTGSTRVPLQGFKALQGSTGAAGPRLFTIHLIDANTDNLPKAHTCFNRIDIPPYESYEKLYEKLLTAVEETCGFAVE

SEQ ID NO: 20610 - protein, 608 aa, Artificial Sequence
  Synthetic polypeptide
FMRQLEKSEHRTVYEDSGPGRPLSCFMEEPAPYTDSTGAAAGGGNCRFVESPSQDQRLQAQRLRNPDVRGSLQTPQNRPHGHQSPELPEGYEQRTTVQGQVYFLHTQTGVSTWHDPRIPSPSGTIPGGDAAFLYEFLLQGHTSEPRDLNSVNCDELGPLPPGWEVRSTVSGRIYFVDHNNRTTQFTDPRLHHIMNHQCQLKEPSQPLPLPSEGSLEDEELPAQRYERDLVQKLKVLRHELSLQQPQAGHCRIEVSREEIFEESYRQIMKMRPKDLKKRLMVKFRGEEGLDYGGVAREWLYLLCHEMLNPYYGLFQYSTDNIYMLQINPDSSINPDHLSYFHFVGRIMGLAVFHGHYINGGFTVPFYKQLLGKPIQLSDLESVDPELHKSLVWILENDITPVLDHTFCVEHNAFGRILQHELKPNGRNVPVTEENKKEYVRLYVNWRFMRGIEAQFLALQKGFNELIPQHLLKPFDQKELELIIGGLDKIDLNDWKSNTRLKHCVADSNIVRWFWQAVETFDEERRARLLQFVTGSTRVPLQGFKALQGSTGAAGPRLFTIHLIDANTDNLPKAHTCFNRIDIPPYESYEKLYEKLLTAVEETCGFAVE

SEQ ID NO: 20611 - protein, 5 aa, Artificial Sequence
  Synthetic polypeptide
TPNGV

SEQ ID NO: 20612 - protein, 25 aa, Artificial Sequence
  Synthetic polypeptide
AQEFKVSLANMIPTGPPTLWASSSA

SEQ ID NO: 20613 - protein, 82 aa, Artificial Sequence
  Synthetic polypeptide
SQHFGRLRWEDRLSPGVQGQPGQHDPDWASYTLGVFICLSCSGIHRNIPQVSKVKSVRLDAWEEAQVEFMASHGNDAARARF

SEQ ID NO: 20614 - protein, 172 aa, Artificial Sequence
  Synthetic polypeptide
SQHFGRLRWEDRLSPGVQGQPGQHDPDWASYTLGVFICLSCSGIHRNIPQVSKVKSVRLDAWEEAQVEFMASHGNDAARARFESKVPSFYYRPTPSDCQLLREQWIRAKYERQEFIYPEKQEPYSAGYREGFLWKRGRDNGQFLSRKFVLTEREGALKYFNRNDAKEPKAVM

SEQ ID NO: 20615 - protein, 371 aa, Artificial Sequence
  Synthetic polypeptide
SQHFGRLRWEDRLSPGVQGQPGQHDPDWASYTLGVFICLSCSGIHRNIPQVSKVKSVRLDAWEEAQVEFMASHGNDAARARFESKVPSFYYRPTPSDCQLLREQWIRAKYERQEFIYPEKQEPYSAGYREGFLWKRGRDNGQFLSRKFVLTEREGALKYFNRNDAKEPKAVMKIEHLNATFQPAKIGHPHGLQVTYLKDNSTRNIFIYHEDGKEIVDWFNALRAARFHYLQVAFPGAGDADLVPKLSRNYLKEGYMEKTGPKQTEGFRKRWFTMDDRRLMYFKDPLDAFARGEVFIGSKESGYTVLHGFPPSTQGHHWPHGITIVTPDRKFLFACETESDQREWVAAFQKAVDRPMLPQEYAVEAHFKHKP

SEQ ID NO: 20616 - protein, 19 aa, Artificial Sequence
  Synthetic polypeptide
AQEFKIPTGPPTLWASSSA

SEQ ID NO: 20617 - protein, 85 aa, Artificial Sequence
  Synthetic polypeptide
GQARWLTPVIPALWEAEVGGSLEPRSSRSRLGLLHSGRLHLPELLGNPPEYPPGQQGEVRPPGRLGGGPSGVHGLPRERRRESQV

SEQ ID NO: 20618 - protein, 76 aa, Artificial Sequence
  Synthetic polypeptide
SQHFGRLRWEDRLSPGVQDPDWASYTLGVFICLSCSGIHRNIPQVSKVKSVRLDAWEEAQVEFMASHGNDAARARF

SEQ ID NO: 20619 - protein, 166 aa, Artificial Sequence
  Synthetic polypeptide
SQHFGRLRWEDRLSPGVQDPDWASYTLGVFICLSCSGIHRNIPQVSKVKSVRLDAWEEAQVEFMASHGNDAARARFESKVPSFYYRPTPSDCQLLREQWIRAKYERQEFIYPEKQEPYSAGYREGFLWKRGRDNGQFLSRKFVLTEREGALKYFNRNDAKEPKAVM

SEQ ID NO: 20620 - protein, 365 aa, Artificial Sequence
  Synthetic polypeptide
SQHFGRLRWEDRLSPGVQDPDWASYTLGVFICLSCSGIHRNIPQVSKVKSVRLDAWEEAQVEFMASHGNDAARARFESKVPSFYYRPTPSDCQLLREQWIRAKYERQEFIYPEKQEPYSAGYREGFLWKRGRDNGQFLSRKFVLTEREGALKYFNRNDAKEPKAVMKIEHLNATFQPAKIGHPHGLQVTYLKDNSTRNIFIYHEDGKEIVDWFNALRAARFHYLQVAFPGAGDADLVPKLSRNYLKEGYMEKTGPKQTEGFRKRWFTMDDRRLMYFKDPLDAFARGEVFIGSKESGYTVLHGFPPSTQGHHWPHGITIVTPDRKFLFACETESDQREWVAAFQKAVDRPMLPQEYAVEAHFKHKP

SEQ ID NO: 20621 - protein, 27 aa, Artificial Sequence
  Synthetic polypeptide
GFLSHVELSRKKLSPGKTKTSWTQRCL

SEQ ID NO: 20622 - protein, 37 aa, Artificial Sequence; identical to SEQ ID NO: 5990
  Synthetic polypeptide

SEQ ID NO: 20623 - protein, 42 aa, Artificial Sequence; identical to SEQ ID NO: 5606
  Synthetic polypeptide

SEQ ID NO: 20624 - protein, 34 aa, Artificial Sequence; identical to SEQ ID NO: 6211
  Synthetic polypeptide

SEQ ID NO: 20625 - protein, 715 aa, Artificial Sequence; identical to SEQ ID NO: 1736
  Synthetic polypeptide

SEQ ID NO: 20626 - protein, 476 aa, Artificial Sequence; identical to SEQ ID NO: 2075
  Synthetic polypeptide

SEQ ID NO: 20627 - protein, 141 aa, Artificial Sequence; identical to SEQ ID NO: 3171
  Synthetic polypeptide

SEQ ID NO: 20628 - protein, 27 aa, Artificial Sequence
  Synthetic polypeptide
RKMVYEKAQCLVYAFSSSRKSGMFTKH

SEQ ID NO: 20629 - protein, 24 aa, Artificial Sequence
  Synthetic polypeptide
HINEGCGDKILEKKETQKKTASAV

SEQ ID NO: 20630 - protein, 27 aa, Artificial Sequence
  Synthetic polypeptide
RLWRQDPGEEGNPKENCISSLKCIKSR

SEQ ID NO: 20631 - protein, 1102 aa, Artificial Sequence
  Synthetic polypeptide
WWIRQFGLTLPLRTTRKAGSNIKIICSYQRANTSMKAVETRSWRRRKPKRKLHQQFEMYKEQVKKMGEESQQQQEQKGDAPTCGICHKTKFADGCGHNCSYCQTKFCARCGGRVSLRSNKVMWVCNLCRKQQEILTKSGAWFYNSGSNTPQQPDQKVLRGLRNEEAPQEKKPKLHEQTQFQGPSGDLSVPAVEKSRSHGLTRQHSIKNGSGVKHHIASDIASDRKRSPSVSRDQNRRYDQREEREEYSQYATSDTAMPRSPSDYADRRSQHEPQFYEDSDHLSYRDSNRRSHRHSKEYIVDDEDVESRDEYERQRREEEYQSRYRSDPNLARYPVKPQPYEEQMRIHAEVSRARHERRHSDVSLANADLEDSRISMLRMDRPSRQRSISERRAAMENQRSYSMERTREAQGPSSYAQRTTNHSPPTPRRSPLPIDRPDLRRTDSLRKQHHLDPSSAVRKTKREKMETMLRNDSLSSDQSESVRPPPPKPHKSKKGGKMRQISLSSSEEELASTPEYTSCDDVEIESESVSEKGDMDYNWLDHTSWHSSEASPMSLHPVTWQPSKDGDRLIGRILLNKRLKDGSVPRDSGAMLGLKVVGGKMTESGRLCAFITKVKKGSLADTVGHLRPGDEVLEWNGRLLQGATFEEVYNIILESKPEPQVELVVSRPIGDIPRIPDSTHAQLESSSSSFESQKMDRPSISVTSPMSPGMLRDVPQFLSGQLSSQSLSRRTTPFVPRVQIKLWFDKVGHQLIVTILGAKDLPSREDGRPRNPYVKIYFLPDRSDKNKRRTKTVKKTLEPKWNQTFIYSPVHRREFRERMLEITLWDQARVREEESEFLGEILIELETALLDDEPHWYKLQTHDVSSLPLPHPSPYMPRRQLHGESPTRRLQRSKRISDSEVSDYDCDDGIGVVSDYRHDGRDLQSSTLSVPEQVMSSNHCSPSGSPHRVDVIGRTRSWSPSVPPPQSRNVEQGLRGTRTMTGHYNTISRMDRHRVMDDHYSPDRDRDCEAADRQPYHRSRSTEQRPLLERTTTRSRSTERPDTNLMRSMPSLMTGRSAPPSPALSRSHPRTGSVQTSPSSTPVAGRRGRQLPQLPPKGTLDR

SEQ ID NO: 20632 - protein, 1340 aa, Artificial Sequence
  Synthetic polypeptide
WWIRQFGLTLPLRTTRKAGSNIKIICSYQRANTSMKAVETRSWRRRKPKRKLHQQFEMYKEQVKKMGEESQQQQEQKGDAPTCGICHKTKFADGCGHNCSYCQTKFCARCGGRVSLRSNKVMWVCNLCRKQQEILTKSGAWFYNSGSNTPQQPDQKVLRGLRNEEAPQEKKPKLHEQTQFQGPSGDLSVPAVEKSRSHGLTRQHSIKNGSGVKHHIASDIASDRKRSPSVSRDQNRRYDQREEREEYSQYATSDTAMPRSPSDYADRRSQHEPQFYEDSDHLSYRDSNRRSHRHSKEYIVDDEDVESRDEYERQRREEEYQSRYRSDPNLARYPVKPQPYEEQMRIHAEVSRARHERRHSDVSLANADLEDSRISMLRMDRPSRQRSISERRAAMENQRSYSMERTREAQGPSSYAQRTTNHSPPTPRRSPLPIDRPDLRRTDSLRKQHHLDPSSAVRKTKREKMETMLRNDSLSSDQSESVRPPPPKPHKSKKGGKMRQISLSSSEEELASTPEYTSCDDVEIESESVSEKGDMDYNWLDHTSWHSSEASPMSLHPVTWQPSKDGDRLIGRILLNKRLKDGSVPRDSGAMLGLKVVGGKMTESGRLCAFITKVKKGSLADTVGHLRPGDEVLEWNGRLLQGATFEEVYNIILESKPEPQVELVVSRPIGDIPRIPDSTHAQLESSSSSFESQKMDRPSISVTSPMSPGMLRDVPQFLSGQLSSQSLSRRTTPFVPRVQIKLWFDKVGHQLIVTILGAKDLPSREDGRPRNPYVKIYFLPDRSDKNKRRTKTVKKTLEPKWNQTFIYSPVHRREFRERMLEITLWDQARVREEESEFLGEILIELETALLDDEPHWYKLQTHDVSSLPLPHPSPYMPRRQLHGESPTRRLQRSKRISDSEVSDYDCDDGIGVVSDYRHDGRDLQSSTLSVPEQVMSSNHCSPSGSPHRVDVIGRTRSWSPSVPPPQSRNVEQGLRGTRTMTGHYNTISRMDRHRVMDDHYSPDRDRDCEAADRQPYHRSRSTEQRPLLERTTTRSRSTERPDTNLMRSMPSLMTGRSAPPSPALSRSHPRTGSVQTSPSSTPVAGRRGRQLPQLPPKGTLDRKAGGKKLRSTVQRSTETGLAVEMRNWMTRQASRESTDGSMNSYSSEGNLIFPGVRLASDSQFSDFLDGLGPAQLVGRQTLATPAMGDIQVGMMDKKGQLEVEIIRARGLVVKPGSKTLPAPYVKVYLLDNGVCIAKKKTKVARKTLEPLYQQLLSFEESPQGKVLQIIVWGDYGRMDHKSFMGVAQILLDELELSNMVIGWFKLFPPSSLVDPTLAPLTRRASQSSLESSTGPSYSRS

SEQ ID NO: 20633 - protein, 12 aa, Artificial Sequence
  Synthetic polypeptide
FLHFQLRVKENK

SEQ ID NO: 20634 - protein, 211 aa, Artificial Sequence
  Synthetic polypeptide
GSKRISDSEVSDYDCDDGIGVVSDYRHDGRDLQSSTLSVPEQVMSSNHCSPSGSPHRVDVIGRTRSWSPSVPPPQSRNVEQGLRGTRTMTGHYNTISRMDRHRVMDDHYSPDRDRDCEAADRQPYHRSRSTEQRPLLERTTTRSRSTERPDTNLMRSMPSLMTGRSAPPSPALSRSHPRTGSVQTSPSSTPVAGRRGRQLPQLPPKGTLDR

SEQ ID NO: 20635 - protein, 449 aa, Artificial Sequence
  Synthetic polypeptide
GSKRISDSEVSDYDCDDGIGVVSDYRHDGRDLQSSTLSVPEQVMSSNHCSPSGSPHRVDVIGRTRSWSPSVPPPQSRNVEQGLRGTRTMTGHYNTISRMDRHRVMDDHYSPDRDRDCEAADRQPYHRSRSTEQRPLLERTTTRSRSTERPDTNLMRSMPSLMTGRSAPPSPALSRSHPRTGSVQTSPSSTPVAGRRGRQLPQLPPKGTLDRKAGGKKLRSTVQRSTETGLAVEMRNWMTRQASRESTDGSMNSYSSEGNLIFPGVRLASDSQFSDFLDGLGPAQLVGRQTLATPAMGDIQVGMMDKKGQLEVEIIRARGLVVKPGSKTLPAPYVKVYLLDNGVCIAKKKTKVARKTLEPLYQQLLSFEESPQGKVLQIIVWGDYGRMDHKSFMGVAQILLDELELSNMVIGWFKLFPPSSLVDPTLAPLTRRASQSSLESSTGPSYSRS

SEQ ID NO: 20636 - protein, 471 aa, Artificial Sequence
  Synthetic polypeptide
GSKRISDSEVSDYDCDDGIGVVSDYRHDGRDLQSSTLSVPEQVMSSNHCSPSGSPHRVDVIGRTRSWSPSVPPPQSRNVEQGLRGTRTMTGHYNTISRMDRHRVMDDHYSPDRDSHFLTLPRSRYSQTIDHHHRDGRDCEAADRQPYHRSRSTEQRPLLERTTTRSRSTERPDTNLMRSMPSLMTGRSAPPSPALSRSHPRTGSVQTSPSSTPVAGRRGRQLPQLPPKGTLDRKAGGKKLRSTVQRSTETGLAVEMRNWMTRQASRESTDGSMNSYSSEGNLIFPGVRLASDSQFSDFLDGLGPAQLVGRQTLATPAMGDIQVGMMDKKGQLEVEIIRARGLVVKPGSKTLPAPYVKVYLLDNGVCIAKKKTKVARKTLEPLYQQLLSFEESPQGKVLQIIVWGDYGRMDHKSFMGVAQILLDELELSNMVIGWFKLFPPSSLVDPTLAPLTRRASQSSLESSTGPSYSRS

SEQ ID NO: 20637 - protein, 561 aa, Artificial Sequence
  Synthetic polypeptide
GSKRISDSEVSDYDCDDGIGVVSDYRHDGRDLQSSTLSVPEQVMSSNHCSPSGSPHRVDVIGRTRSWSPSVPPPQSRNVEQGLRGTRTMTGHYNTISRMDRHRVMDDHYSPDRDSHFLTLPRSRYSQTIDHHHRDGRDCEAADRQPYHRSRSTEQRPLLERTTTRSRSTERPDTNLMRSMPSLMTGRSAPPSPALSRSHPRTGSVQTSPSSTPVAGRRGRQLPQLPPKGTLDRNNGVKEIEPYEELDSTRRRYAGTMDIEERNRQMKINKYKQVAGSDPRLEQDYHSKYRSGWDPHRGADNVSTKSSDSDVSDISAVSRTSSASRFSSTSYMSVQSERPGGNKKISVFTSKMQSRQMGISGKNMTKSTSISGDMCSLEKNDGSQSDTAVGTLGTSGKKRRSSLGAKMVAIVGLSRKSRSASQLSQTEAGGKKLRSTVQRSTETGLAVEMRNWMTRQASRESTDGSMNSYSSEGNLIFPGVRLASDSQFSDFLDGLGPAQLVGRQTLATPAMGDIQVGMMDKKGQLEVEIIRARGLVVKPGSKTLPAPYVKVYLLDNGVCIA

SEQ ID NO: 20638 - protein, 689 aa, Artificial Sequence
  Synthetic polypeptide
GSKRISDSEVSDYDCDDGIGVVSDYRHDGRDLQSSTLSVPEQVMSSNHCSPSGSPHRVDVIGRTRSWSPSVPPPQSRNVEQGLRGTRTMTGHYNTISRMDRHRVMDDHYSPDRDSHFLTLPRSRYSQTIDHHHRDGRSHPRTGSVQTSPSSTPVAGRRGRQLPQLPPKGTLDRNNGVKEIEPYEEELDSTRRRYAGTMDIEERNRQMKINKYKQVAGSDPRLEQDYHSKYRSGWDPHRGADNVSTKSSDSDVSDISAVSRTSSASRFSSTSYMSVQSERPGGNKKIRPKGIEEGGKEGDKHEEIVHEKEEVKEERINENEKGKEIAKTCNKEKNRESGDEEKTQDIHEQGKEKEQWNKEDLQRRFSQDDTSVFTSKMQSRQMGISGKNMTKSTSISGDMCSLEKNDGSQSDTAVGTLGTSGKKRRSSLGAKMVAIVGLSRKSRSASQLSQTEAGGKKLRSTVQRSTETGLAVEMRNWMTRQASRESTDGSMNSYSSEGNLIFPGVRLASDSQFSDFLDGLGPAQLVGRQTLATPAMGDIQVGMMDKKGQLEVEIIRARGLVVKPGSKTLPAPYVKVYLLDNGVCIAKKKTKVARKTLEPLYQQLLSFEESPQGKVLQIIVWGDYGRMDHKSFMGVAQILLDELELSNMVIGWFKLFPPSSLVDPTLAPLTRRASQSSLESSTGPSYSRS

SEQ ID NO: 20639 - protein, 33 aa, Artificial Sequence
  Synthetic polypeptide
QDDRIGTPLVCSSQRDRRRRRVISAFPTEGQRE

SEQ ID NO: 20640 - protein, 21 aa, Artificial Sequence
  Synthetic polypeptide
KVLWSECGTGASRDPHYDRTL

SEQ ID NO: 20641 - protein, 38 aa, Artificial Sequence
  Synthetic polypeptide
NGTQRQTTLFPPSTHKENSRLKSTMVGMWNRGFEGPAL

SEQ ID NO: 20642 - protein, 145 aa, Artificial Sequence
  Synthetic polypeptide
REFQTKKYYGRNVEQGLRGTRTMTGHYNTISRMDRHRVMDDHYSPDRDRDCEAADRQPYHRSRSTEQRPLLERTTTRSRSTERPDTNLMRSMPSLMTGRSAPPSPALSRSHPRTGSVQTSPSSTPVAGRRGRQLPQLPPKGTLDR

SEQ ID NO: 20643 - protein, 383 aa, Artificial Sequence
  Synthetic polypeptide
REFQTKKYYGRNVEQGLRGTRTMTGHYNTISRMDRHRVMDDHYSPDRDRDCEAADRQPYHRSRSTEQRPLLERTTTRSRSTERPDTNLMRSMPSLMTGRSAPPSPALSRSHPRTGSVQTSPSSTPVAGRRGRQLPQLPPKGTLDRKAGGKKLRSTVQRSTETGLAVEMRNWMTRQASRESTDGSMNSYSSEGNLIFPGVRLASDSQFSDFLDGLGPAQLVGRQTLATPAMGDIQVGMMDKKGQLEVEIIRARGLVVKPGSKTLPAPYVKVYLLDNGVCIAKKKTKVARKTLEPLYQQLLSFEESPQGKVLQIIVWGDYGRMDHKSFMGVAQILLDELELSNMVIGWFKLFPPSSLVDPTLAPLTRRASQSSLESSTGPSYSRS

SEQ ID NO: 20644 - protein, 405 aa, Artificial Sequence
  Synthetic polypeptide
REFQTKKYYGRNVEQGLRGTRTMTGHYNTISRMDRHRVMDDHYSPDRDSHFLTLPRSRYSQTIDHHHRDGRDCEAADRQPYHRSRSTEQRPLLERTTTRSRSTERPDTNLMRSMPSLMTGRSAPPSPALSRSHPRTGSVQTSPSSTPVAGRRGRQLPQLPPKGTLDRKAGGKKLRSTVQRSTETGLAVEMRNWMTRQASRESTDGSMNSYSSEGNLIFPGVRLASDSQFSDFLDGLGPAQLVGRQTLATPAMGDIQVGMMDKKGQLEVEIIRARGLVVKPGSKTLPAPYVKVYLLDNGVCIAKKKTKVARKTLEPLYQQLLSFEESPQGKVLQIIVWGDYGRMDHKSFMGVAQILLDELELSNMVIGWFKLFPPSSLVDPTLAPLTRRASQSSLESSTGPSYSRS

SEQ ID NO: 20645 - protein, 495 aa, Artificial Sequence
  Synthetic polypeptide
REFQTKKYYGRNVEQGLRGTRTMTGHYNTISRMDRHRVMDDHYSPDRDSHFLTLPRSRYSQTIDHHHRDGRDCEAADRQPYHRSRSTEQRPLLERTTTRSRSTERPDTNLMRSMPSLMTGRSAPPSPALSRSHPRTGSVQTSPSSTPVAGRRGRQLPQLPPKGTLDRNNGVKEIEPYEELDSTRRRYAGTMDIEERNRQMKINKYKQVAGSDPRLEQDYHSKYRSGWDPHRGADNVSTKSSDSDVSDISAVSRTSSASRFSSTSYMSVQSERPGGNKKISVFTSKMQSRQMGISGKNMTKSTSISGDMCSLEKNDGSQSDTAVGTLGTSGKKRRSSLGAKMVAIVGLSRKSRSASQLSQTEAGGKKLRSTVQRSTETGLAVEMRNWMTRQASRESTDGSMNSYSSEGNLIFPGVRLASDSQFSDFLDGLGPAQLVGRQTLATPAMGDIQVGMMDKKGQLEVEIIRARGLVVKPGSKTLPAPYVKVYLLDNGVCIA

SEQ ID NO: 20646 - protein, 623 aa, Artificial Sequence
  Synthetic polypeptide
REFQTKKYYGRNVEQGLRGTRTMTGHYNTISRMDRHRVMDDHYSPDRDSHFLTLPRSRYSQTIDHHHRDGRSHPRTGSVQTSPSSTPVAGRRGRQLPQLPPKGTLDRNNGVKEIEPYEEELDSTRRRYAGTMDIEERNRQMKINKYKQVAGSDPRLEQDYHSKYRSGWDPHRGADNVSTKSSDSDVSDISAVSRTSSASRFSSTSYMSVQSERPGGNKKIRPKGIEEGGKEGDKHEEIVHEKEEVKEERINENEKGKEIAKTCNKEKNRESGDEEKTQDIHEQGKEKEQWNKEDLQRRFSQDDTSVFTSKMQSRQMGISGKNMTKSTSISGDMCSLEKNDGSQSDTAVGTLGTSGKKRRSSLGAKMVAIVGLSRKSRSASQLSQTEAGGKKLRSTVQRSTETGLAVEMRNWMTRQASRESTDGSMNSYSSEGNLIFPGVRLASDSQFSDFLDGLGPAQLVGRQTLATPAMGDIQVGMMDKKGQLEVEIIRARGLVVKPGSKTLPAPYVKVYLLDNGVCIAKKKTKVARKTLEPLYQQLLSFEESPQGKVLQIIVWGDYGRMDHKSFMGVAQILLDELELSNMVIGWFKLFPPSSLVDPTLAPLTRRASQSSLESSTGPSYSRS

SEQ ID NO: 20647 - protein, 20 aa, Artificial Sequence
  Synthetic polypeptide
EAHFSYKLGMWNRGFEGPAL

SEQ ID NO: 20648 - protein, 25 aa, Artificial Sequence
  Synthetic polypeptide
KKPILVTNSECGTGASRDPHYDRTL

SEQ ID NO: 20649 - protein, 138 aa, Artificial Sequence
  Synthetic polypeptide
LQTRNVEQGLRGTRTMTGHYNTISRMDRHRVMDDHYSPDRDRDCEAADRQPYHRSRSTEQRPLLERTTTRSRSTERPDTNLMRSMPSLMTGRSAPPSPALSRSHPRTGSVQTSPSSTPVAGRRGRQLPQLPPKGTLDR

SEQ ID NO: 20650 - protein, 376 aa, Artificial Sequence
  Synthetic polypeptide
LQTRNVEQGLRGTRTMTGHYNTISRMDRHRVMDDHYSPDRDRDCEAADRQPYHRSRSTEQRPLLERTTTRSRSTERPDTNLMRSMPSLMTGRSAPPSPALSRSHPRTGSVQTSPSSTPVAGRRGRQLPQLPPKGTLDRKAGGKKLRSTVQRSTETGLAVEMRNWMTRQASRESTDGSMNSYSSEGNLIFPGVRLASDSQFSDFLDGLGPAQLVGRQTLATPAMGDIQVGMMDKKGQLEVEIIRARGLVVKPGSKTLPAPYVKVYLLDNGVCIAKKKTKVARKTLEPLYQQLLSFEESPQGKVLQIIVWGDYGRMDHKSFMGVAQILLDELELSNMVIGWFKLFPPSSLVDPTLAPLTRRASQSSLESSTGPSYSRS

SEQ ID NO: 20651 - protein, 398 aa, Artificial Sequence
  Synthetic polypeptide
LQTRNVEQGLRGTRTMTGHYNTISRMDRHRVMDDHYSPDRDSHFLTLPRSRYSQTIDHHHRDGRDCEAADRQPYHRSRSTEQRPLLERTTTRSRSTERPDTNLMRSMPSLMTGRSAPPSPALSRSHPRTGSVQTSPSSTPVAGRRGRQLPQLPPKGTLDRKAGGKKLRSTVQRSTETGLAVEMRNWMTRQASRESTDGSMNSYSSEGNLIFPGVRLASDSQFSDFLDGLGPAQLVGRQTLATPAMGDIQVGMMDKKGQLEVEIIRARGLVVKPGSKTLPAPYVKVYLLDNGVCIAKKKTKVARKTLEPLYQQLLSFEESPQGKVLQIIVWGDYGRMDHKSFMGVAQILLDELELSNMVIGWFKLFPPSSLVDPTLAPLTRRASQSSLESSTGPSYSRS

SEQ ID NO: 20652 - protein, 488 aa, Artificial Sequence
  Synthetic polypeptide
LQTRNVEQGLRGTRTMTGHYNTISRMDRHRVMDDHYSPDRDSHFLTLPRSRYSQTIDHHHRDGRDCEAADRQPYHRSRSTEQRPLLERTTTRSRSTERPDTNLMRSMPSLMTGRSAPPSPALSRSHPRTGSVQTSPSSTPVAGRRGRQLPQLPPKGTLDRNNGVKEIEPYEELDSTRRRYAGTMDIEERNRQMKINKYKQVAGSDPRLEQDYHSKYRSGWDPHRGADNVSTKSSDSDVSDISAVSRTSSASRFSSTSYMSVQSERPGGNKKISVFTSKMQSRQMGISGKNMTKSTSISGDMCSLEKNDGSQSDTAVGTLGTSGKKRRSSLGAKMVAIVGLSRKSRSASQLSQTEAGGKKLRSTVQRSTETGLAVEMRNWMTRQASRESTDGSMNSYSSEGNLIFPGVRLASDSQFSDFLDGLGPAQLVGRQTLATPAMGDIQVGMMDKKGQLEVEIIRARGLVVKPGSKTLPAPYVKVYLLDNGVCIA

SEQ ID NO: 20653 - protein, 616 aa, Artificial Sequence
  Synthetic polypeptide
LQTRNVEQGLRGTRTMTGHYNTISRMDRHRVMDDHYSPDRDSHFLTLPRSRYSQTIDHHHRDGRSHPRTGSVQTSPSSTPVAGRRGRQLPQLPPKGTLDRNNGVKEIEPYEEELDSTRRRYAGTMDIEERNRQMKINKYKQVAGSDPRLEQDYHSKYRSGWDPHRGADNVSTKSSDSDVSDISAVSRTSSASRFSSTSYMSVQSERPGGNKKIRPKGIEEGGKEGDKHEEIVHEKEEVKEERINENEKGKEIAKTCNKEKNRESGDEEKTQDIHEQGKEKEQWNKEDLQRRFSQDDTSVFTSKMQSRQMGISGKNMTKSTSISGDMCSLEKNDGSQSDTAVGTLGTSGKKRRSSLGAKMVAIVGLSRKSRSASQLSQTEAGGKKLRSTVQRSTETGLAVEMRNWMTRQASRESTDGSMNSYSSEGNLIFPGVRLASDSQFSDFLDGLGPAQLVGRQTLATPAMGDIQVGMMDKKGQLEVEIIRARGLVVKPGSKTLPAPYVKVYLLDNGVCIAKKKTKVARKTLEPLYQQLLSFEESPQGKVLQIIVWGDYGRMDHKSFMGVAQILLDELELSNMVIGWFKLFPPSSLVDPTLAPLTRRASQSSLESSTGPSYSRS

SEQ ID NO: 20654 - protein, 410 aa, Artificial Sequence
  Synthetic polypeptide
EQLRSTAPSVSDAEDGGFLHFHLRYIRTMYLGIQSQRRKEHQRRFYWAMMYEYADVNMLRLLETFLESAPQLVLQLYIMLQKNSAETLPCVSSVTSLMSLAWVLASYHKLLRDSRDDKKSMSYRGAIIQVFWRLFTISSRVISFALFASIFQLYFGIFVVVHWCAMAFWIIHGGTDFCMSKWEEILFNMVVGIVYIFCWFNVKEGRTRYRMFAYYTIVLTENAALTFLWYFYRDPETTDSYAVPALCCVFISFVAGIAMMLLYYGVLHPTGPRAKILASSCCAELLWGIPLPPDVEPMAPEIPGYRGTQVTPTRAVTEQQEDLTADTCLPVFQVRPMGPPTPLGRPYLPEGPLIKIDMPRKRYPAWDAHFVDRRLRRTINILQYVTPTAVGIRYRDGPLLYELLQYESSL

SEQ ID NO: 20655 - protein, 25 aa, Artificial Sequence
  Synthetic polypeptide
GISAPCTWGFRASGGRNTSDASTGL

SEQ ID NO: 20656 - protein, 59 aa, Artificial Sequence
  Synthetic polypeptide
GRSQDGRIGTAPLYSSQRERCRRRGISAFPSEVYPHHVPGDSEPAAEGTPATLLLGYDV

SEQ ID NO: 20657 - protein, 1026 aa, Artificial Sequence
  Synthetic polypeptide
CVPVVPDTQEAEAISCGIPKAPTNGGILTTDYLVGTRVTYFCNDGYRLSSKELTTAVCQSDGTWSNHNKTPRCVVISCGELPTPPNGNKIGTQTSYGSTAIFTCDLGFMLVGSAVRECLSSGLWSESETRCLAGHCGIPELIVNGQVIGENYGYRDTVVYQCNPGFRLIGSSVRICQQDHNWSGQLPSCVPVSCGHPGSPIYGRTSGNGFNFNDVVTFSCNIGYLMQGPTKAQCQANRQWSHPPPMCKVVNCSDPGIPANSKRESKIEHGNFTYGTVVFYDCNPGYFLFGSSVLICQPNGQWDKPLPECIMIDCGHPGVPPNAVLSGEKYTFGSTVHYSCTGKRSLLGQSSRTCQLNGHWSGSQPHCSGDATGTCGDPGTPGHGSRQESNFRTKSTVRYACDTGYILHGSEERTCLANGSWTGRQPECKAVQCGNPGTTANGKVFRIDGTTFSSSVIYSCMEGYILSGPSVRQCTANGTWSGTLPNCTIISCGDPGIPANGLRYGDDYVVGQNVSYMCQPGYTMELNGSRIRTCTINGTWSGVMPTCRAVTCPTPPQISNGRLEGTNFDWGFSISYICSPGYELSFPAVLTCVGNGTWSGEVPQCLPKFCGDPGIPAQGKREGKSFIYQSEVSFSCNFPFILVGSSTRICQADGTWSGSSPHCIEPTQTSCENPGVPRHGSQNNTFGFQVGSVVQFHCKKGHLLQGSTTRTCLPDLTWSGIQPECIPHSCKQPETPAHANVVGMDLPSHGYTLIYTCQPGFFLAGGTEHRVCRSDNTWTGKVPICEAGSKILVKDPRPALGTPSPKLSVPDDVFAQNYIWKGSYNFKGRKQPMTLTVTSFNASTGRVNATLSNSNMELLLSGVYKSQEARLMLRIYLIKVPAHASVKKMKEENWAMDGFVSAEPDGATYVFQGFIQGKDYGQFGLQRLGLNMSEGSNSSNQPHGTNSSSVAIAILVPFFALIFAGFGFYLYKQRTAPKTQYTGCSVHENNNGQAAFENPMYDTNAKSVEGKAVRFDPNLNTVCTMV

SEQ ID NO: 20658 - protein, 1091 aa, Artificial Sequence
  Synthetic polypeptide
CVPVVPDTQEAEAISCGIPKAPTNGGILTTDYLVGTRVTYFCNDGYRLSSKELTTAVCQSDGTWSNHNKTPRCVVVTCPSINSFILEHGRWRIVNGSHYEYKTKVVFSCDPGYHGLGPASIECLPNGTWSWRNERPYCQIISCGELPTPPNGNKIGTQTSYGSTAIFTCDLGFMLVGSAVRECLSSGLWSESETRCLAGHCGIPELIVNGQVIGENYGYRDTVVYQCNPGFRLIGSSVRICQQDHNWSGQLPSCVPVSCGHPGSPIYGRTSGNGFNFNDVVTFSCNIGYLMQGPTKAQCQANRQWSHPPPMCKVVNCSDPGIPANSKRESKIEHGNFTYGTVVFYDCNPGYFLFGSSVLICQPNGQWDKPLPECIMIDCGHPGVPPNAVLSGEKYTFGSTVHYSCTGKRSLLGQSSRTCQLNGHWSGSQPHCSGDATGTCGDPGTPGHGSRQESNFRTKSTVRYACDTGYILHGSEERTCLANGSWTGRQPECKAVQCGNPGTTANGKVFRIDGTTFSSSVIYSCMEGYILSGPSVRQCTANGTWSGTLPNCTIISCGDPGIPANGLRYGDDYVVGQNVSYMCQPGYTMELNGSRIRTCTINGTWSGVMPTCRAVTCPTPPQISNGRLEGTNFDWGFSISYICSPGYELSFPAVLTCVGNGTWSGEVPQCLPKFCGDPGIPAQGKREGKSFIYQSEVSFSCNFPFILVGSSTRICQADGTWSGSSPHCIEPTQTSCENPGVPRHGSQNNTFGFQVGSVVQFHCKKGHLLQGSTTRTCLPDLTWSGIQPECIPHSCKQPETPAHANVVGMDLPSHGYTLIYTCQPGFFLAGGTEHRVCRSDNTWTGKVPICEAGSKILVKDPRPALGTPSPKLSVPDDVFAQNYIWKGSYNFKGRKQPMTLTVTSFNASTGRVNATLSNSNMELLLSGVYKSQEARLMLRIYLIKVPAHASVKKMKEENWAMDGFVSAEPDGATYVFQGFIQGKDYGQFGLQRLGLNMSEGSNSSNQPHGTNSSSVAIAILVPFFALIFAGFGFYLYKQRTAPKTQYTGCSVHENNNGQAAFENPMYDTNAKSVEGKAVRFDPNLNTVCTMV

SEQ ID NO: 20659 - protein, 7 aa, Artificial Sequence
  Synthetic polypeptide
SNFLWDS

SEQ ID NO: 20660 - protein, 23 aa, Artificial Sequence
  Synthetic polypeptide
SQILRRLKQFPVGFLKLQQMEEY

SEQ ID NO: 20661 - protein, 7 aa, Artificial Sequence
  Synthetic polypeptide
ECPVVEF

SEQ ID NO: 20662 - protein, 1731 aa, Artificial Sequence
  Synthetic polypeptide
PPVGPECGTFPAACLGGDLQPVSLGVPCGGILTKRKGTILSPGYPEPYDNNLNCVWKITVPEGAGIQVQVVSFATEHNWDSLDFYDGGDNNAPRLGSYSGTTIPHLLNSTSNNLYLNFQSDISVSAAGFHLEYTAIGLDSCPEPQTPSSGIKIGDRYMVGDVVSFQCDQGYSLQGHSHITCMPGPVRRWNYPIPICLAQCGGAMSDFSGVILSPGFPGNYPSSLDCTWTINLPIGFGVHLQFVNFSTETIHDYLEVRSGSSETSTVIGRLSGPQIPSSLFSTTHETSLYFHSDYSQNKQGFHIVYQAYQLQSCPDPRPFRNGFVIGNDFTVGQTISFECFPGYTLIGNSALTCLHGVSRNWNHPLPRCEALCGGNITAMNGTIYSPGYPDEYPNFQDCFWLVRVPPGNGIYINFTVLQTEPIYDFITVWDGPDQNSPQIGQFSGNTALESVYSTSNQILIKFHSDFTTSGFFVLSYHAYQLRVCQPPPPVPNAEILTEDDEFEIGDIIRYQCLPGFTLVGNAILTCRLGERLQMDGAPPVCQVLCPANELRLDSTGVILSPGYPDSYPNLQMCAWSISVEKGYNITMFVEFFQTEKEFDVLQVYDGPNIQSPVLISLSGDYSSAFNITSNGHEVFLQWSADHGNNKKGFRIRYIAFYCSTPESPPHGYIISQTGGQLNSVVRWACDRGFRLVGKSSAVCRKSSYGYHAWDAPVPACQAISCGIPKAPTNGGILTTDYLVGTRVTYFCNDGYRLSSKELTTAVCQSDGTWSNHNKTPRCVVISCGELPTPPNGNKIGTQTSYGSTAIFTCDLGFMLVGSAVRECLSSGLWSESETRCLAGHCGIPELIVNGQVIGENYGYRDTVVYQCNPGFRLIGSSVRICQQDHNWSGQLPSCVPVSCGHPGSPIYGRTSGNGFNFNDVVTFSCNIGYLMQGPTKAQCQANRQWSHPPPMCKVVNCSDPGIPANSKRESKIEHGNFTYGTVVFYDCNPGYFLFGSSVLICQPNGQWDKPLPECIMIDCGHPGVPPNAVLSGEKYTFGSTVHYSCTGKRSLLGQSSRTCQLNGHWSGSQPHCSGDATGTCGDPGTPGHGSRQESNFRTKSTVRYACDTGYILHGSEERTCLANGSWTGRQPECKAVQCGNPGTTANGKVFRIDGTTFSSSVIYSCMEGYILSGPSVRQCTANGTWSGTLPNCTIISCGDPGIPANGLRYGDDYVVGQNVSYMCQPGYTMELNGSRIRTCTINGTWSGVMPTCRAVTCPTPPQISNGRLEGTNFDWGFSISYICSPGYELSFPAVLTCVGNGTWSGEVPQCLPKFCGDPGIPAQGKREGKSFIYQSEVSFSCNFPFILVGSSTRICQADGTWSGSSPHCIEPTQTSCENPGVPRHGSQNNTFGFQVGSVVQFHCKKGHLLQGSTTRTCLPDLTWSGIQPECIPHSCKQPETPAHANVVGMDLPSHGYTLIYTCQPGFFLAGGTEHRVCRSDNTWTGKVPICEAGSKILVKDPRPALGTPSPKLSVPDDVFAQNYIWKGSYNFKGRKQPMTLTVTSFNASTGRVNATLSNSNMELLLSGVYKSQEARLMLRIYLIKVPAHASVKKMKEENWAMDGFVSAEPDGATYVFQGFIQGKDYGQFGLQRLGLNMSEGSNSSNQPHGTNSSSVAIAILVPFFALIFAGFGFYLYKQRTAPKTQYTGCSVHENNNGQAAFENPMYDTNAKSVEGKAVRFDPNLNTVCTMV

SEQ ID NO: 20663 - protein, 1796 aa, Artificial Sequence
  Synthetic polypeptide
PPVGPECGTFPAACLGGDLQPVSLGVPCGGILTKRKGTILSPGYPEPYDNNLNCVWKITVPEGAGIQVQVVSFATEHNWDSLDFYDGGDNNAPRLGSYSGTTIPHLLNSTSNNLYLNFQSDISVSAAGFHLEYTAIGLDSCPEPQTPSSGIKIGDRYMVGDVVSFQCDQGYSLQGHSHITCMPGPVRRWNYPIPICLAQCGGAMSDFSGVILSPGFPGNYPSSLDCTWTINLPIGFGVHLQFVNFSTETIHDYLEVRSGSSETSTVIGRLSGPQIPSSLFSTTHETSLYFHSDYSQNKQGFHIVYQAYQLQSCPDPRPFRNGFVIGNDFTVGQTISFECFPGYTLIGNSALTCLHGVSRNWNHPLPRCEALCGGNITAMNGTIYSPGYPDEYPNFQDCFWLVRVPPGNGIYINFTVLQTEPIYDFITVWDGPDQNSPQIGQFSGNTALESVYSTSNQILIKFHSDFTTSGFFVLSYHAYQLRVCQPPPPVPNAEILTEDDEFEIGDIIRYQCLPGFTLVGNAILTCRLGERLQMDGAPPVCQVLCPANELRLDSTGVILSPGYPDSYPNLQMCAWSISVEKGYNITMFVEFFQTEKEFDVLQVYDGPNIQSPVLISLSGDYSSAFNITSNGHEVFLQWSADHGNNKKGFRIRYIAFYCSTPESPPHGYIISQTGGQLNSVVRWACDRGFRLVGKSSAVCRKSSYGYHAWDAPVPACQAISCGIPKAPTNGGILTTDYLVGTRVTYFCNDGYRLSSKELTTAVCQSDGTWSNHNKTPRCVVVTCPSINSFILEHGRWRIVNGSHYEYKTKVVFSCDPGYHGLGPASIECLPNGTWSWRNERPYCQIISCGELPTPPNGNKIGTQTSYGSTAIFTCDLGFMLVGSAVRECLSSGLWSESETRCLAGHCGIPELIVNGQVIGENYGYRDTVVYQCNPGFRLIGSSVRICQQDHNWSGQLPSCVPVSCGHPGSPIYGRTSGNGFNFNDVVTFSCNIGYLMQGPTKAQCQANRQWSHPPPMCKVVNCSDPGIPANSKRESKIEHGNFTYGTVVFYDCNPGYFLFGSSVLICQPNGQWDKPLPECIMIDCGHPGVPPNAVLSGEKYTFGSTVHYSCTGKRSLLGQSSRTCQLNGHWSGSQPHCSGDATGTCGDPGTPGHGSRQESNFRTKSTVRYACDTGYILHGSEERTCLANGSWTGRQPECKAVQCGNPGTTANGKVFRIDGTTFSSSVIYSCMEGYILSGPSVRQCTANGTWSGTLPNCTIISCGDPGIPANGLRYGDDYVVGQNVSYMCQPGYTMELNGSRIRTCTINGTWSGVMPTCRAVTCPTPPQISNGRLEGTNFDWGFSISYICSPGYELSFPAVLTCVGNGTWSGEVPQCLPKFCGDPGIPAQGKREGKSFIYQSEVSFSCNFPFILVGSSTRICQADGTWSGSSPHCIEPTQTSCENPGVPRHGSQNNTFGFQVGSVVQFHCKKGHLLQGSTTRTCLPDLTWSGIQPECIPHSCKQPETPAHANVVGMDLPSHGYTLIYTCQPGFFLAGGTEHRVCRSDNTWTGKVPICEAGSKILVKDPRPALGTPSPKLSVPDDVFAQNYIWKGSYNFKGRKQPMTLTVTSFNASTGRVNATLSNSNMELLLSGVYKSQEARLMLRIYLIKVPAHASVKKMKEENWAMDGFVSAEPDGATYVFQGFIQGKDYGQFGLQRLGLNMSEGSNSSNQPHGTNSSSVAIAILVPFFALIFAGFGFYLYKQRTAPKTQYTGCSVHENNNGQAAFENPMYDTNAKSVEGKAVRFDPNLNTVCTMV

SEQ ID NO: 20664 - protein, 69 aa, Artificial Sequence
  Synthetic polypeptide
SHWCVMLVRENHRHATLTCESCSMYYAQQTYRSKTITSSRSRMWDLPCSVSGWRPPTCESRSALWWNFN

SEQ ID NO: 20665 - protein, 46 aa, Artificial Sequence
  Synthetic polypeptide
HALPYPPSLSGCYSRHLGPMWWPFFSSQWSDSLTRMARILQRLFEL

SEQ ID NO: 20666 - protein, 2769 aa, Artificial Sequence
  Synthetic polypeptide
KCWHSFSMLFPILQVSLAATQGTLAPCGGHFSAPSGVILSPGWPGYYKDSLNCEWVIEAEPGHSIKITFERFQTELNYDVLEVHDGPNLLSPLLGSYNGTQVPQFLFSSSNFIYLLFTTDNSRSNNGFKIHYESVTVNTYSCLDPGIPVHGRRYGHDFSIGSTVSFSCDSGYRLSHEEPLLCEKNHWWSHPLPTCDALCGGDVRGPSGTILSPGYPEFYPNSLNCTWTVDVTHGKGVQFNFHTFHLEDHHDYLLITENGSFTQPLARLTGSDLPPTINAGLYGNFRAQLRFISDFSISYEGFNITFSEYNLEPCEDPGIPQYGSRIGFNFGIGDTLTFSCSSGYRLEGTSEIICLGGGRRVWSAPLPRCVAECGASATNNEGILLSPNYPLNYENNHECIYSIQVQAGKGINISARTFHLAQGDVLKIYDGKDKTTHLLGAFTGASMRGLTLSSTSNQLWLEFNSDTEGTDEGFQLVYTSFELSHCEDPGIPQFGYKISDQGHFAGSTIIYGCNPGYTLHGSSLLKCMTGERRAWDYPLPSCIAECGGRFKGESSGRILSPGYPFPYDNNLRCMWMIEVDPGNIVSLQFLAFDTEASHDILRVWDGPPENDMLLKEISGSLIPEGIHSTLNIVTIQFDTDFYISKSGFAIQFSSSVATACRDPGVPMNGTRNGDGREPGDTVVFQCDPGYELQGEERITCIQVENRYFWQPSPPVCIAPCGGNLTGSSGFILSPNFPHPYPHSRDCDWTITVNADYVISLAFISFSIEPNYDFLYIYDGPDSNSPLIGSFQDSKLPERIESSSNTMHLAFRSDGSVSYTGFHLEYKAKLRESCFDPGNIMNGTRLGMDYKLGSTVTYYCDAGYVLQGYSTLTCIMGDDGRPGWNRALPSCHAPCGSRSTGSEGTVLSPNYPKNYSVGHNCVYSIAVPKEFAVPRTSSTQCSSVPEPRFGRRIGNEFAVGSSVLFDCNPGYILHGSIAIRCETVPNSLAQWNDSLPTCIVPCGGILTKRKGTILSPGYPEPYDNNLNCVWKITVPEGAGIQVQVVSFATEHNWDSLDFYDGGDNNAPRLGSYSGTTIPHLLNSTSNNLYLNFQSDISVSAAGFHLEYTAIGLDSCPEPQTPSSGIKIGDRYMVGDVVSFQCDQGYSLQGHSHITCMPGPVRRWNYPIPICLAQCGGAMSDFSGVILSPGFPGNYPSSLDCTWTINLPIGFGVHLQFVNFSTETIHDYLEVRSGSSETSTVIGRLSGPQIPSSLFSTTHETSLYFHSDYSQNKQGFHIVYQAYQLQSCPDPRPFRNGFVIGNDFTVGQTISFECFPGYTLIGNSALTCLHGVSRNWNHPLPRCEALCGGNITAMNGTIYSPGYPDEYPNFQDCFWLVRVPPGNGIYINFTVLQTEPIYDFITVWDGPDQNSPQIGQFSGNTALESVYSTSNQILIKFHSDFTTSGFFVLSYHAYQLRVCQPPPPVPNAEILTEDDEFEIGDIIRYQCLPGFTLVGNAILTCRLGERLQMDGAPPVCQVLCPANELRLDSTGVILSPGYPDSYPNLQMCAWSISVEKGYNITMFVEFFQTEKEFDVLQVYDGPNIQSPVLISLSGDYSSAFNITSNGHEVFLQWSADHGNNKKGFRIRYIAFYCSTPESPPHGYIISQTGGQLNSVVRWACDRGFRLVGKSSAVCRKSSYGYHAWDAPVPACQAISCGIPKAPTNGGILTTDYLVGTRVTYFCNDGYRLSSKELTTAVCQSDGTWSNHNKTPRCVVVTCPSINSFILEHGRWRIVNGSHYEYKTKVVFSCDPGYHGLGPASIECLPNGTWSWRNERPYCQIISCGELPTPPNGNKIGTQTSYGSTAIFTCDLGFMLVGSAVRECLSSGLWSESETRCLAGHCGIPELIVNGQVIGENYGYRDTVVYQCNPGFRLIGSSVRICQQDHNWSGQLPSCVPVSCGHPGSPIYGRTSGNGFNFNDVVTFSCNIGYLMQGPTKAQCQANRQWSHPPPMCKVVNCSDPGIPANSKRESKIEHGNFTYGTVVFYDCNPGYFLFGSSVLICQPNGQWDKPLPECIMIDCGHPGVPPNAVLSGEKYTFGSTVHYSCTGKRSLLGQSSRTCQLNGHWSGSQPHCSGDATGTCGDPGTPGHGSRQESNFRTKSTVRYACDTGYILHGSEERTCLANGSWTGRQPECKAVQCGNPGTTANGKVFRIDGTTFSSSVIYSCMEGYILSGPSVRQCTANGTWSGTLPNCTIISCGDPGIPANGLRYGDDYVVGQNVSYMCQPGYTMELNGSRIRTCTINGTWSGVMPTCRAVTCPTPPQISNGRLEGTNFDWGFSISYICSPGYELSFPAVLTCVGNGTWSGEVPQCLPKFCGDPGIPAQGKREGKSFIYQSEVSFSCNFPFILVGSSTRICQADGTWSGSSPHCIEPTQTSCENPGVPRHGSQNNTFGFQVGSVVQFHCKKGHLLQGSTTRTCLPDLTWSGIQPECIPHSCKQPETPAHANVVGMDLPSHGYTLIYTCQPGFFLAGGTEHRVCRSDNTWTGKVPICEAGSKILVKDPRPALGTPSPKLSVPDDVFAQNYIWKGSYNFKGRKQPMTLTVTSFNASTGRVNATLSNSNMELLLSGVYKSQEARLMLRIYLIKVPAHASVKKMKEENWAMDGFVSAEPDGATYVFQGFIQGKDYGQFGLQRLGLNMSEGSNSSNQPHGTNSSSVAIAILVPFFALIFAGFGFYLYKQRTAPKTQYTGCSVHENNNGQAAFENPMYDTNAKSVEGKAVRFDPNLNTVCTMV

SEQ ID NO: 20667 - protein, 2774 aa, Artificial Sequence
  Synthetic polypeptide
KCWHSFSMLFPILQVSLAATQGTLAPCGGHFSAPSGVILSPGWPGYYKDSLNCEWVIEAEPGHSIKITFERFQTELNYDVLEVHDGPNLLSPLLGSYNGTQVPQFLFSSSNFIYLLFTTDNSRSNNGFKIHYESVTVNTYSCLDPGIPVHGRRYGHDFSIGSTVSFSCDSGYRLSHEEPLLCEKNHWWSHPLPTCDALCGGDVRGPSGTILSPGYPEFYPNSLNCTWTVDVTHGKGVQFNFHTFHLEDHHDYLLITENGSFTQPLARLTGSDLPPTINAGLYGNFRAQLRFISDFSISYEGFNITFSEYNLEPCEDPGIPQYGSRIGFNFGIGDTLTFSCSSGYRLEGTSEIICLGGGRRVWSAPLPRCVAECGASATNNEGILLSPNYPLNYENNHECIYSIQVQAGKGINISARTFHLAQGDVLKIYDGKDKTTHLLGAFTGASMRGLTLSSTSNQLWLEFNSDTEGTDEGFQLVYTSFELSHCEDPGIPQFGYKISDQGHFAGSTIIYGCNPGYTLHGSSLLKCMTGERRAWDYPLPSCIAECGGRFKGESSGRILSPGYPFPYDNNLRCMWMIEVDPGNIVSLQFLAFDTEASHDILRVWDGPPENDMLLKEISGSLIPEGIHSTLNIVTIQFDTDFYISKSGFAIQFSSSVATACRDPGVPMNGTRNGDGREPGDTVVFQCDPGYELQGEERITCIQVENRYFWQPSPPVCIAPCGGNLTGSSGFILSPNFPHPYPHSRDCDWTITVNADYVISLAFISFSIEPNYDFLYIYDGPDSNSPLIGSFQDSKLPERIESSSNTMHLAFRSDGSVSYTGFHLEYKAKLRESCFDPGNIMNGTRLGMDYKLGSTVTYYCDAGYVLQGYSTLTCIMGDDGRPGWNRALPSCHAPCGSRSTGSEGTVLSPNYPKNYSVGHNCVYSIAVPKEFVVFGQFVFFQTSLHDVVEVYDGPTQQSSLLSSLSGSHSGESLPLSSGNQITIRFTSVGPITAKGFHFVYQAVPRTSSTQCSSVPEPRFGRRIGNEFAVGSSVLFDCNPGYILHGSIAIRCETVPNSLAQWNDSLPTCIVPCGGILTKRKGTILSPGYPEPYDNNLNCVWKITVPEGAGIQVQVVSFATEHNWDSLDFYDGGDNNAPRLGSYSGTTIPHLLNSTSNNLYLNFQSDISVSAAGFHLEYTAIGLDSCPEPQTPSSGIKIGDRYMVGDVVSFQCDQGYSLQGHSHITCMPGPVRRWNYPIPICLAQCGGAMSDFSGVILSPGFPGNYPSSLDCTWTINLPIGFGVHLQFVNFSTETIHDYLEVRSGSSETSTVIGRLSGPQIPSSLFSTTHETSLYFHSDYSQNKQGFHIVYQAYQLQSCPDPRPFRNGFVIGNDFTVGQTISFECFPGYTLIGNSALTCLHGVSRNWNHPLPRCEALCGGNITAMNGTIYSPGYPDEYPNFQDCFWLVRVPPGNGIYINFTVLQTEPIYDFITVWDGPDQNSPQIGQFSGNTALESVYSTSNQILIKFHSDFTTSGFFVLSYHAYQLRVCQPPPPVPNAEILTEDDEFEIGDIIRYQCLPGFTLVGNAILTCRLGERLQMDGAPPVCQVLCPANELRLDSTGVILSPGYPDSYPNLQMCAWSISVEKGYNITMFVEFFQTEKEFDVLQVYDGPNIQSPVLISLSGDYSSAFNITSNGHEVFLQWSADHGNNKKGFRIRYIAFYCSTPESPPHGYIISQTGGQLNSVVRWACDRGFRLVGKSSAVCRKSSYGYHAWDAPVPACQAISCGIPKAPTNGGILTTDYLVGTRVTYFCNDGYRLSSKELTTAVCQSDGTWSNHNKTPRCVVISCGELPTPPNGNKIGTQTSYGSTAIFTCDLGFMLVGSAVRECLSSGLWSESETRCLAGHCGIPELIVNGQVIGENYGYRDTVVYQCNPGFRLIGSSVRICQQDHNWSGQLPSCVPVSCGHPGSPIYGRTSGNGFNFNDVVTFSCNIGYLMQGPTKAQCQANRQWSHPPPMCKVVNCSDPGIPANSKRESKIEHGNFTYGTVVFYDCNPGYFLFGSSVLICQPNGQWDKPLPECIMIDCGHPGVPPNAVLSGEKYTFGSTVHYSCTGKRSLLGQSSRTCQLNGHWSGSQPHCSGDATGTCGDPGTPGHGSRQESNFRTKSTVRYACDTGYILHGSEERTCLANGSWTGRQPECKAVQCGNPGTTANGKVFRIDGTTFSSSVIYSCMEGYILSGPSVRQCTANGTWSGTLPNCTIISCGDPGIPANGLRYGDDYVVGQNVSYMCQPGYTMELNGSRIRTCTINGTWSGVMPTCRAVTCPTPPQISNGRLEGTNFDWGFSISYICSPGYELSFPAVLTCVGNGTWSGEVPQCLPKFCGDPGIPAQGKREGKSFIYQSEVSFSCNFPFILVGSSTRICQADGTWSGSSPHCIEPTQTSCENPGVPRHGSQNNTFGFQVGSVVQFHCKKGHLLQGSTTRTCLPDLTWSGIQPECIPHSCKQPETPAHANVVGMDLPSHGYTLIYTCQPGFFLAGGTEHRVCRSDNTWTGKVPICEAGSKILVKDPRPALGTPSPKLSVPDDVFAQNYIWKGSYNFKGRKQPMTLTVTSFNASTGRVNATLSNSNMELLLSGVYKSQEARLMLRIYLIKVPAHASVKKMKEENWAMDGFVSAEPDGATYVFQGFIQGKDYGQFGLQRLGLNMSEGSNSSNQPHGTNSSSVAIAILVPFFALIFAGFGFYLYKQRTAPKTQYTGCSVHENNNGQAAFENPMYDTNAKSVEGKAVRFDPNLNTVCTMV

SEQ ID NO: 20668 - protein, 2839 aa, Artificial Sequence
  Synthetic polypeptide
KCWHSFSMLFPILQVSLAATQGTLAPCGGHFSAPSGVILSPGWPGYYKDSLNCEWVIEAEPGHSIKITFERFQTELNYDVLEVHDGPNLLSPLLGSYNGTQVPQFLFSSSNFIYLLFTTDNSRSNNGFKIHYESVTVNTYSCLDPGIPVHGRRYGHDFSIGSTVSFSCDSGYRLSHEEPLLCEKNHWWSHPLPTCDALCGGDVRGPSGTILSPGYPEFYPNSLNCTWTVDVTHGKGVQFNFHTFHLEDHHDYLLITENGSFTQPLARLTGSDLPPTINAGLYGNFRAQLRFISDFSISYEGFNITFSEYNLEPCEDPGIPQYGSRIGFNFGIGDTLTFSCSSGYRLEGTSEIICLGGGRRVWSAPLPRCVAECGASATNNEGILLSPNYPLNYENNHECIYSIQVQAGKGINISARTFHLAQGDVLKIYDGKDKTTHLLGAFTGASMRGLTLSSTSNQLWLEFNSDTEGTDEGFQLVYTSFELSHCEDPGIPQFGYKISDQGHFAGSTIIYGCNPGYTLHGSSLLKCMTGERRAWDYPLPSCIAECGGRFKGESSGRILSPGYPFPYDNNLRCMWMIEVDPGNIVSLQFLAFDTEASHDILRVWDGPPENDMLLKEISGSLIPEGIHSTLNIVTIQFDTDFYISKSGFAIQFSSSVATACRDPGVPMNGTRNGDGREPGDTVVFQCDPGYELQGEERITCIQVENRYFWQPSPPVCIAPCGGNLTGSSGFILSPNFPHPYPHSRDCDWTITVNADYVISLAFISFSIEPNYDFLYIYDGPDSNSPLIGSFQDSKLPERIESSSNTMHLAFRSDGSVSYTGFHLEYKAKLRESCFDPGNIMNGTRLGMDYKLGSTVTYYCDAGYVLQGYSTLTCIMGDDGRPGWNRALPSCHAPCGSRSTGSEGTVLSPNYPKNYSVGHNCVYSIAVPKEFVVFGQFVFFQTSLHDVVEVYDGPTQQSSLLSSLSGSHSGESLPLSSGNQITIRFTSVGPITAKGFHFVYQAVPRTSSTQCSSVPEPRFGRRIGNEFAVGSSVLFDCNPGYILHGSIAIRCETVPNSLAQWNDSLPTCIVPCGGILTKRKGTILSPGYPEPYDNNLNCVWKITVPEGAGIQVQVVSFATEHNWDSLDFYDGGDNNAPRLGSYSGTTIPHLLNSTSNNLYLNFQSDISVSAAGFHLEYTAIGLDSCPEPQTPSSGIKIGDRYMVGDVVSFQCDQGYSLQGHSHITCMPGPVRRWNYPIPICLAQCGGAMSDFSGVILSPGFPGNYPSSLDCTWTINLPIGFGVHLQFVNFSTETIHDYLEVRSGSSETSTVIGRLSGPQIPSSLFSTTHETSLYFHSDYSQNKQGFHIVYQAYQLQSCPDPRPFRNGFVIGNDFTVGQTISFECFPGYTLIGNSALTCLHGVSRNWNHPLPRCEALCGGNITAMNGTIYSPGYPDEYPNFQDCFWLVRVPPGNGIYINFTVLQTEPIYDFITVWDGPDQNSPQIGQFSGNTALESVYSTSNQILIKFHSDFTTSGFFVLSYHAYQLRVCQPPPPVPNAEILTEDDEFEIGDIIRYQCLPGFTLVGNAILTCRLGERLQMDGAPPVCQVLCPANELRLDSTGVILSPGYPDSYPNLQMCAWSISVEKGYNITMFVEFFQTEKEFDVLQVYDGPNIQSPVLISLSGDYSSAFNITSNGHEVFLQWSADHGNNKKGFRIRYIAFYCSTPESPPHGYIISQTGGQLNSVVRWACDRGFRLVGKSSAVCRKSSYGYHAWDAPVPACQAISCGIPKAPTNGGILTTDYLVGTRVTYFCNDGYRLSSKELTTAVCQSDGTWSNHNKTPRCVVVTCPSINSFILEHGRWRIVNGSHYEYKTKVVFSCDPGYHGLGPASIECLPNGTWSWRNERPYCQIISCGELPTPPNGNKIGTQTSYGSTAIFTCDLGFMLVGSAVRECLSSGLWSESETRCLAGHCGIPELIVNGQVIGENYGYRDTVVYQCNPGFRLIGSSVRICQQDHNWSGQLPSCVPVSCGHPGSPIYGRTSGNGFNFNDVVTFSCNIGYLMQGPTKAQCQANRQWSHPPPMCKVVNCSDPGIPANSKRESKIEHGNFTYGTVVFYDCNPGYFLFGSSVLICQPNGQWDKPLPECIMIDCGHPGVPPNAVLSGEKYTFGSTVHYSCTGKRSLLGQSSRTCQLNGHWSGSQPHCSGDATGTCGDPGTPGHGSRQESNFRTKSTVRYACDTGYILHGSEERTCLANGSWTGRQPECKAVQCGNPGTTANGKVFRIDGTTFSSSVIYSCMEGYILSGPSVRQCTANGTWSGTLPNCTIISCGDPGIPANGLRYGDDYVVGQNVSYMCQPGYTMELNGSRIRTCTINGTWSGVMPTCRAVTCPTPPQISNGRLEGTNFDWGFSISYICSPGYELSFPAVLTCVGNGTWSGEVPQCLPKFCGDPGIPAQGKREGKSFIYQSEVSFSCNFPFILVGSSTRICQADGTWSGSSPHCIEPTQTSCENPGVPRHGSQNNTFGFQVGSVVQFHCKKGHLLQGSTTRTCLPDLTWSGIQPECIPHSCKQPETPAHANVVGMDLPSHGYTLIYTCQPGFFLAGGTEHRVCRSDNTWTGKVPICEAGSKILVKDPRPALGTPSPKLSVPDDVFAQNYIWKGSYNFKGRKQPMTLTVTSFNASTGRVNATLSNSNMELLLSGVYKSQEARLMLRIYLIKVPAHASVKKMKEENWAMDGFVSAEPDGATYVFQGFIQGKDYGQFGLQRLGLNMSEGSNSSNQPHGTNSSSVAIAILVPFFALIFAGFGFYLYKQRTAPKTQYTGCSVHENNNGQAAFENPMYDTNAKSVEGKAVRFDPNLNTVCTMV

SEQ ID NO: 20669 - protein, 41 aa, Artificial Sequence
  Synthetic polypeptide
RNESESAGIPLACSSLSSKSLWLLLKAPWPHVVAIFQLPVE

SEQ ID NO: 20670 - protein, 56 aa, Artificial Sequence
  Synthetic polypeptide
LPGKDYDLSPHPSPNSPQETGSKGKRKRTRYKISDNTFSTPSAEPHVVAIFQLPVE

SEQ ID NO: 20671 - protein, 2745 aa, Artificial Sequence
  Synthetic polypeptide
TPCGGHFSAPSGVILSPGWPGYYKDSLNCEWVIEAEPGHSIKITFERFQTELNYDVLEVHDGPNLLSPLLGSYNGTQVPQFLFSSSNFIYLLFTTDNSRSNNGFKIHYESVTVNTYSCLDPGIPVHGRRYGHDFSIGSTVSFSCDSGYRLSHEEPLLCEKNHWWSHPLPTCDALCGGDVRGPSGTILSPGYPEFYPNSLNCTWTVDVTHGKGVQFNFHTFHLEDHHDYLLITENGSFTQPLARLTGSDLPPTINAGLYGNFRAQLRFISDFSISYEGFNITFSEYNLEPCEDPGIPQYGSRIGFNFGIGDTLTFSCSSGYRLEGTSEIICLGGGRRVWSAPLPRCVAECGASATNNEGILLSPNYPLNYENNHECIYSIQVQAGKGINISARTFHLAQGDVLKIYDGKDKTTHLLGAFTGASMRGLTLSSTSNQLWLEFNSDTEGTDEGFQLVYTSFELSHCEDPGIPQFGYKISDQGHFAGSTIIYGCNPGYTLHGSSLLKCMTGERRAWDYPLPSCIAECGGRFKGESSGRILSPGYPFPYDNNLRCMWMIEVDPGNIVSLQFLAFDTEASHDILRVWDGPPENDMLLKEISGSLIPEGIHSTLNIVTIQFDTDFYISKSGFAIQFSSSVATACRDPGVPMNGTRNGDGREPGDTVVFQCDPGYELQGEERITCIQVENRYFWQPSPPVCIAPCGGNLTGSSGFILSPNFPHPYPHSRDCDWTITVNADYVISLAFISFSIEPNYDFLYIYDGPDSNSPLIGSFQDSKLPERIESSSNTMHLAFRSDGSVSYTGFHLEYKAKLRESCFDPGNIMNGTRLGMDYKLGSTVTYYCDAGYVLQGYSTLTCIMGDDGRPGWNRALPSCHAPCGSRSTGSEGTVLSPNYPKNYSVGHNCVYSIAVPKEFAVPRTSSTQCSSVPEPRFGRRIGNEFAVGSSVLFDCNPGYILHGSIAIRCETVPNSLAQWNDSLPTCIVPCGGILTKRKGTILSPGYPEPYDNNLNCVWKITVPEGAGIQVQVVSFATEHNWDSLDFYDGGDNNAPRLGSYSGTTIPHLLNSTSNNLYLNFQSDISVSAAGFHLEYTAIGLDSCPEPQTPSSGIKIGDRYMVGDVVSFQCDQGYSLQGHSHITCMPGPVRRWNYPIPICLAQCGGAMSDFSGVILSPGFPGNYPSSLDCTWTINLPIGFGVHLQFVNFSTETIHDYLEVRSGSSETSTVIGRLSGPQIPSSLFSTTHETSLYFHSDYSQNKQGFHIVYQAYQLQSCPDPRPFRNGFVIGNDFTVGQTISFECFPGYTLIGNSALTCLHGVSRNWNHPLPRCEALCGGNITAMNGTIYSPGYPDEYPNFQDCFWLVRVPPGNGIYINFTVLQTEPIYDFITVWDGPDQNSPQIGQFSGNTALESVYSTSNQILIKFHSDFTTSGFFVLSYHAYQLRVCQPPPPVPNAEILTEDDEFEIGDIIRYQCLPGFTLVGNAILTCRLGERLQMDGAPPVCQVLCPANELRLDSTGVILSPGYPDSYPNLQMCAWSISVEKGYNITMFVEFFQTEKEFDVLQVYDGPNIQSPVLISLSGDYSSAFNITSNGHEVFLQWSADHGNNKKGFRIRYIAFYCSTPESPPHGYIISQTGGQLNSVVRWACDRGFRLVGKSSAVCRKSSYGYHAWDAPVPACQAISCGIPKAPTNGGILTTDYLVGTRVTYFCNDGYRLSSKELTTAVCQSDGTWSNHNKTPRCVVVTCPSINSFILEHGRWRIVNGSHYEYKTKVVFSCDPGYHGLGPASIECLPNGTWSWRNERPYCQIISCGELPTPPNGNKIGTQTSYGSTAIFTCDLGFMLVGSAVRECLSSGLWSESETRCLAGHCGIPELIVNGQVIGENYGYRDTVVYQCNPGFRLIGSSVRICQQDHNWSGQLPSCVPVSCGHPGSPIYGRTSGNGFNFNDVVTFSCNIGYLMQGPTKAQCQANRQWSHPPPMCKVVNCSDPGIPANSKRESKIEHGNFTYGTVVFYDCNPGYFLFGSSVLICQPNGQWDKPLPECIMIDCGHPGVPPNAVLSGEKYTFGSTVHYSCTGKRSLLGQSSRTCQLNGHWSGSQPHCSGDATGTCGDPGTPGHGSRQESNFRTKSTVRYACDTGYILHGSEERTCLANGSWTGRQPECKAVQCGNPGTTANGKVFRIDGTTFSSSVIYSCMEGYILSGPSVRQCTANGTWSGTLPNCTIISCGDPGIPANGLRYGDDYVVGQNVSYMCQPGYTMELNGSRIRTCTINGTWSGVMPTCRAVTCPTPPQISNGRLEGTNFDWGFSISYICSPGYELSFPAVLTCVGNGTWSGEVPQCLPKFCGDPGIPAQGKREGKSFIYQSEVSFSCNFPFILVGSSTRICQADGTWSGSSPHCIEPTQTSCENPGVPRHGSQNNTFGFQVGSVVQFHCKKGHLLQGSTTRTCLPDLTWSGIQPECIPHSCKQPETPAHANVVGMDLPSHGYTLIYTCQPGFFLAGGTEHRVCRSDNTWTGKVPICEAGSKILVKDPRPALGTPSPKLSVPDDVFAQNYIWKGSYNFKGRKQPMTLTVTSFNASTGRVNATLSNSNMELLLSGVYKSQEARLMLRIYLIKVPAHASVKKMKEENWAMDGFVSAEPDGATYVFQGFIQGKDYGQFGLQRLGLNMSEGSNSSNQPHGTNSSSVAIAILVPFFALIFAGFGFYLYKQRTAPKTQYTGCSVHENNNGQAAFENPMYDTNAKSVEGKAVRFDPNLNTVCTMV

SEQ ID NO: 20672 - protein, 2750 aa, Artificial Sequence
  Synthetic polypeptide
TPCGGHFSAPSGVILSPGWPGYYKDSLNCEWVIEAEPGHSIKITFERFQTELNYDVLEVHDGPNLLSPLLGSYNGTQVPQFLFSSSNFIYLLFTTDNSRSNNGFKIHYESVTVNTYSCLDPGIPVHGRRYGHDFSIGSTVSFSCDSGYRLSHEEPLLCEKNHWWSHPLPTCDALCGGDVRGPSGTILSPGYPEFYPNSLNCTWTVDVTHGKGVQFNFHTFHLEDHHDYLLITENGSFTQPLARLTGSDLPPTINAGLYGNFRAQLRFISDFSISYEGFNITFSEYNLEPCEDPGIPQYGSRIGFNFGIGDTLTFSCSSGYRLEGTSEIICLGGGRRVWSAPLPRCVAECGASATNNEGILLSPNYPLNYENNHECIYSIQVQAGKGINISARTFHLAQGDVLKIYDGKDKTTHLLGAFTGASMRGLTLSSTSNQLWLEFNSDTEGTDEGFQLVYTSFELSHCEDPGIPQFGYKISDQGHFAGSTIIYGCNPGYTLHGSSLLKCMTGERRAWDYPLPSCIAECGGRFKGESSGRILSPGYPFPYDNNLRCMWMIEVDPGNIVSLQFLAFDTEASHDILRVWDGPPENDMLLKEISGSLIPEGIHSTLNIVTIQFDTDFYISKSGFAIQFSSSVATACRDPGVPMNGTRNGDGREPGDTVVFQCDPGYELQGEERITCIQVENRYFWQPSPPVCIAPCGGNLTGSSGFILSPNFPHPYPHSRDCDWTITVNADYVISLAFISFSIEPNYDFLYIYDGPDSNSPLIGSFQDSKLPERIESSSNTMHLAFRSDGSVSYTGFHLEYKAKLRESCFDPGNIMNGTRLGMDYKLGSTVTYYCDAGYVLQGYSTLTCIMGDDGRPGWNRALPSCHAPCGSRSTGSEGTVLSPNYPKNYSVGHNCVYSIAVPKEFVVFGQFVFFQTSLHDVVEVYDGPTQQSSLLSSLSGSHSGESLPLSSGNQITIRFTSVGPITAKGFHFVYQAVPRTSSTQCSSVPEPRFGRRIGNEFAVGSSVLFDCNPGYILHGSIAIRCETVPNSLAQWNDSLPTCIVPCGGILTKRKGTILSPGYPEPYDNNLNCVWKITVPEGAGIQVQVVSFATEHNWDSLDFYDGGDNNAPRLGSYSGTTIPHLLNSTSNNLYLNFQSDISVSAAGFHLEYTAIGLDSCPEPQTPSSGIKIGDRYMVGDVVSFQCDQGYSLQGHSHITCMPGPVRRWNYPIPICLAQCGGAMSDFSGVILSPGFPGNYPSSLDCTWTINLPIGFGVHLQFVNFSTETIHDYLEVRSGSSETSTVIGRLSGPQIPSSLFSTTHETSLYFHSDYSQNKQGFHIVYQAYQLQSCPDPRPFRNGFVIGNDFTVGQTISFECFPGYTLIGNSALTCLHGVSRNWNHPLPRCEALCGGNITAMNGTIYSPGYPDEYPNFQDCFWLVRVPPGNGIYINFTVLQTEPIYDFITVWDGPDQNSPQIGQFSGNTALESVYSTSNQILIKFHSDFTTSGFFVLSYHAYQLRVCQPPPPVPNAEILTEDDEFEIGDIIRYQCLPGFTLVGNAILTCRLGERLQMDGAPPVCQVLCPANELRLDSTGVILSPGYPDSYPNLQMCAWSISVEKGYNITMFVEFFQTEKEFDVLQVYDGPNIQSPVLISLSGDYSSAFNITSNGHEVFLQWSADHGNNKKGFRIRYIAFYCSTPESPPHGYIISQTGGQLNSVVRWACDRGFRLVGKSSAVCRKSSYGYHAWDAPVPACQAISCGIPKAPTNGGILTTDYLVGTRVTYFCNDGYRLSSKELTTAVCQSDGTWSNHNKTPRCVVISCGELPTPPNGNKIGTQTSYGSTAIFTCDLGFMLVGSAVRECLSSGLWSESETRCLAGHCGIPELIVNGQVIGENYGYRDTVVYQCNPGFRLIGSSVRICQQDHNWSGQLPSCVPVSCGHPGSPIYGRTSGNGFNFNDVVTFSCNIGYLMQGPTKAQCQANRQWSHPPPMCKVVNCSDPGIPANSKRESKIEHGNFTYGTVVFYDCNPGYFLFGSSVLICQPNGQWDKPLPECIMIDCGHPGVPPNAVLSGEKYTFGSTVHYSCTGKRSLLGQSSRTCQLNGHWSGSQPHCSGDATGTCGDPGTPGHGSRQESNFRTKSTVRYACDTGYILHGSEERTCLANGSWTGRQPECKAVQCGNPGTTANGKVFRIDGTTFSSSVIYSCMEGYILSGPSVRQCTANGTWSGTLPNCTIISCGDPGIPANGLRYGDDYVVGQNVSYMCQPGYTMELNGSRIRTCTINGTWSGVMPTCRAVTCPTPPQISNGRLEGTNFDWGFSISYICSPGYELSFPAVLTCVGNGTWSGEVPQCLPKFCGDPGIPAQGKREGKSFIYQSEVSFSCNFPFILVGSSTRICQADGTWSGSSPHCIEPTQTSCENPGVPRHGSQNNTFGFQVGSVVQFHCKKGHLLQGSTTRTCLPDLTWSGIQPECIPHSCKQPETPAHANVVGMDLPSHGYTLIYTCQPGFFLAGGTEHRVCRSDNTWTGKVPICEAGSKILVKDPRPALGTPSPKLSVPDDVFAQNYIWKGSYNFKGRKQPMTLTVTSFNASTGRVNATLSNSNMELLLSGVYKSQEARLMLRIYLIKVPAHASVKKMKEENWAMDGFVSAEPDGATYVFQGFIQGKDYGQFGLQRLGLNMSEGSNSSNQPHGTNSSSVAIAILVPFFALIFAGFGFYLYKQRTAPKTQYTGCSVHENNNGQAAFENPMYDTNAKSVEGKAVRFDPNLNTVCTMV

SEQ ID NO: 20673 - protein, 2815 aa, Artificial Sequence
  Synthetic polypeptide
TPCGGHFSAPSGVILSPGWPGYYKDSLNCEWVIEAEPGHSIKITFERFQTELNYDVLEVHDGPNLLSPLLGSYNGTQVPQFLFSSSNFIYLLFTTDNSRSNNGFKIHYESVTVNTYSCLDPGIPVHGRRYGHDFSIGSTVSFSCDSGYRLSHEEPLLCEKNHWWSHPLPTCDALCGGDVRGPSGTILSPGYPEFYPNSLNCTWTVDVTHGKGVQFNFHTFHLEDHHDYLLITENGSFTQPLARLTGSDLPPTINAGLYGNFRAQLRFISDFSISYEGFNITFSEYNLEPCEDPGIPQYGSRIGFNFGIGDTLTFSCSSGYRLEGTSEIICLGGGRRVWSAPLPRCVAECGASATNNEGILLSPNYPLNYENNHECIYSIQVQAGKGINISARTFHLAQGDVLKIYDGKDKTTHLLGAFTGASMRGLTLSSTSNQLWLEFNSDTEGTDEGFQLVYTSFELSHCEDPGIPQFGYKISDQGHFAGSTIIYGCNPGYTLHGSSLLKCMTGERRAWDYPLPSCIAECGGRFKGESSGRILSPGYPFPYDNNLRCMWMIEVDPGNIVSLQFLAFDTEASHDILRVWDGPPENDMLLKEISGSLIPEGIHSTLNIVTIQFDTDFYISKSGFAIQFSSSVATACRDPGVPMNGTRNGDGREPGDTVVFQCDPGYELQGEERITCIQVENRYFWQPSPPVCIAPCGGNLTGSSGFILSPNFPHPYPHSRDCDWTITVNADYVISLAFISFSIEPNYDFLYIYDGPDSNSPLIGSFQDSKLPERIESSSNTMHLAFRSDGSVSYTGFHLEYKAKLRESCFDPGNIMNGTRLGMDYKLGSTVTYYCDAGYVLQGYSTLTCIMGDDGRPGWNRALPSCHAPCGSRSTGSEGTVLSPNYPKNYSVGHNCVYSIAVPKEFVVFGQFVFFQTSLHDVVEVYDGPTQQSSLLSSLSGSHSGESLPLSSGNQITIRFTSVGPITAKGFHFVYQAVPRTSSTQCSSVPEPRFGRRIGNEFAVGSSVLFDCNPGYILHGSIAIRCETVPNSLAQWNDSLPTCIVPCGGILTKRKGTILSPGYPEPYDNNLNCVWKITVPEGAGIQVQVVSFATEHNWDSLDFYDGGDNNAPRLGSYSGTTIPHLLNSTSNNLYLNFQSDISVSAAGFHLEYTAIGLDSCPEPQTPSSGIKIGDRYMVGDVVSFQCDQGYSLQGHSHITCMPGPVRRWNYPIPICLAQCGGAMSDFSGVILSPGFPGNYPSSLDCTWTINLPIGFGVHLQFVNFSTETIHDYLEVRSGSSETSTVIGRLSGPQIPSSLFSTTHETSLYFHSDYSQNKQGFHIVYQAYQLQSCPDPRPFRNGFVIGNDFTVGQTISFECFPGYTLIGNSALTCLHGVSRNWNHPLPRCEALCGGNITAMNGTIYSPGYPDEYPNFQDCFWLVRVPPGNGIYINFTVLQTEPIYDFITVWDGPDQNSPQIGQFSGNTALESVYSTSNQILIKFHSDFTTSGFFVLSYHAYQLRVCQPPPPVPNAEILTEDDEFEIGDIIRYQCLPGFTLVGNAILTCRLGERLQMDGAPPVCQVLCPANELRLDSTGVILSPGYPDSYPNLQMCAWSISVEKGYNITMFVEFFQTEKEFDVLQVYDGPNIQSPVLISLSGDYSSAFNITSNGHEVFLQWSADHGNNKKGFRIRYIAFYCSTPESPPHGYIISQTGGQLNSVVRWACDRGFRLVGKSSAVCRKSSYGYHAWDAPVPACQAISCGIPKAPTNGGILTTDYLVGTRVTYFCNDGYRLSSKELTTAVCQSDGTWSNHNKTPRCVVVTCPSINSFILEHGRWRIVNGSHYEYKTKVVFSCDPGYHGLGPASIECLPNGTWSWRNERPYCQIISCGELPTPPNGNKIGTQTSYGSTAIFTCDLGFMLVGSAVRECLSSGLWSESETRCLAGHCGIPELIVNGQVIGENYGYRDTVVYQCNPGFRLIGSSVRICQQDHNWSGQLPSCVPVSCGHPGSPIYGRTSGNGFNFNDVVTFSCNIGYLMQGPTKAQCQANRQWSHPPPMCKVVNCSDPGIPANSKRESKIEHGNFTYGTVVFYDCNPGYFLFGSSVLICQPNGQWDKPLPECIMIDCGHPGVPPNAVLSGEKYTFGSTVHYSCTGKRSLLGQSSRTCQLNGHWSGSQPHCSGDATGTCGDPGTPGHGSRQESNFRTKSTVRYACDTGYILHGSEERTCLANGSWTGRQPECKAVQCGNPGTTANGKVFRIDGTTFSSSVIYSCMEGYILSGPSVRQCTANGTWSGTLPNCTIISCGDPGIPANGLRYGDDYVVGQNVSYMCQPGYTMELNGSRIRTCTINGTWSGVMPTCRAVTCPTPPQISNGRLEGTNFDWGFSISYICSPGYELSFPAVLTCVGNGTWSGEVPQCLPKFCGDPGIPAQGKREGKSFIYQSEVSFSCNFPFILVGSSTRICQADGTWSGSSPHCIEPTQTSCENPGVPRHGSQNNTFGFQVGSVVQFHCKKGHLLQGSTTRTCLPDLTWSGIQPECIPHSCKQPETPAHANVVGMDLPSHGYTLIYTCQPGFFLAGGTEHRVCRSDNTWTGKVPICEAGSKILVKDPRPALGTPSPKLSVPDDVFAQNYIWKGSYNFKGRKQPMTLTVTSFNASTGRVNATLSNSNMELLLSGVYKSQEARLMLRIYLIKVPAHASVKKMKEENWAMDGFVSAEPDGATYVFQGFIQGKDYGQFGLQRLGLNMSEGSNSSNQPHGTNSSSVAIAILVPFFALIFAGFGFYLYKQRTAPKTQYTGCSVHENNNGQAAFENPMYDTNAKSVEGKAVRFDPNLNTVCTMV

SEQ ID NO: 20674 - protein, 39 aa, Artificial Sequence
  Synthetic polypeptide
VIIPSLLQVLNPMWWPFFSSQWSDSLTRMARILQRLFEL

SEQ ID NO: 20675 - protein, 2768 aa, Artificial Sequence
  Synthetic polypeptide
LPGKDYDLSPHPSPNSPQETGSKAPCGGHFSAPSGVILSPGWPGYYKDSLNCEWVIEAEPGHSIKITFERFQTELNYDVLEVHDGPNLLSPLLGSYNGTQVPQFLFSSSNFIYLLFTTDNSRSNNGFKIHYESVTVNTYSCLDPGIPVHGRRYGHDFSIGSTVSFSCDSGYRLSHEEPLLCEKNHWWSHPLPTCDALCGGDVRGPSGTILSPGYPEFYPNSLNCTWTVDVTHGKGVQFNFHTFHLEDHHDYLLITENGSFTQPLARLTGSDLPPTINAGLYGNFRAQLRFISDFSISYEGFNITFSEYNLEPCEDPGIPQYGSRIGFNFGIGDTLTFSCSSGYRLEGTSEIICLGGGRRVWSAPLPRCVAECGASATNNEGILLSPNYPLNYENNHECIYSIQVQAGKGINISARTFHLAQGDVLKIYDGKDKTTHLLGAFTGASMRGLTLSSTSNQLWLEFNSDTEGTDEGFQLVYTSFELSHCEDPGIPQFGYKISDQGHFAGSTIIYGCNPGYTLHGSSLLKCMTGERRAWDYPLPSCIAECGGRFKGESSGRILSPGYPFPYDNNLRCMWMIEVDPGNIVSLQFLAFDTEASHDILRVWDGPPENDMLLKEISGSLIPEGIHSTLNIVTIQFDTDFYISKSGFAIQFSSSVATACRDPGVPMNGTRNGDGREPGDTVVFQCDPGYELQGEERITCIQVENRYFWQPSPPVCIAPCGGNLTGSSGFILSPNFPHPYPHSRDCDWTITVNADYVISLAFISFSIEPNYDFLYIYDGPDSNSPLIGSFQDSKLPERIESSSNTMHLAFRSDGSVSYTGFHLEYKAKLRESCFDPGNIMNGTRLGMDYKLGSTVTYYCDAGYVLQGYSTLTCIMGDDGRPGWNRALPSCHAPCGSRSTGSEGTVLSPNYPKNYSVGHNCVYSIAVPKEFAVPRTSSTQCSSVPEPRFGRRIGNEFAVGSSVLFDCNPGYILHGSIAIRCETVPNSLAQWNDSLPTCIVPCGGILTKRKGTILSPGYPEPYDNNLNCVWKITVPEGAGIQVQVVSFATEHNWDSLDFYDGGDNNAPRLGSYSGTTIPHLLNSTSNNLYLNFQSDISVSAAGFHLEYTAIGLDSCPEPQTPSSGIKIGDRYMVGDVVSFQCDQGYSLQGHSHITCMPGPVRRWNYPIPICLAQCGGAMSDFSGVILSPGFPGNYPSSLDCTWTINLPIGFGVHLQFVNFSTETIHDYLEVRSGSSETSTVIGRLSGPQIPSSLFSTTHETSLYFHSDYSQNKQGFHIVYQAYQLQSCPDPRPFRNGFVIGNDFTVGQTISFECFPGYTLIGNSALTCLHGVSRNWNHPLPRCEALCGGNITAMNGTIYSPGYPDEYPNFQDCFWLVRVPPGNGIYINFTVLQTEPIYDFITVWDGPDQNSPQIGQFSGNTALESVYSTSNQILIKFHSDFTTSGFFVLSYHAYQLRVCQPPPPVPNAEILTEDDEFEIGDIIRYQCLPGFTLVGNAILTCRLGERLQMDGAPPVCQVLCPANELRLDSTGVILSPGYPDSYPNLQMCAWSISVEKGYNITMFVEFFQTEKEFDVLQVYDGPNIQSPVLISLSGDYSSAFNITSNGHEVFLQWSADHGNNKKGFRIRYIAFYCSTPESPPHGYIISQTGGQLNSVVRWACDRGFRLVGKSSAVCRKSSYGYHAWDAPVPACQAISCGIPKAPTNGGILTTDYLVGTRVTYFCNDGYRLSSKELTTAVCQSDGTWSNHNKTPRCVVVTCPSINSFILEHGRWRIVNGSHYEYKTKVVFSCDPGYHGLGPASIECLPNGTWSWRNERPYCQIISCGELPTPPNGNKIGTQTSYGSTAIFTCDLGFMLVGSAVRECLSSGLWSESETRCLAGHCGIPELIVNGQVIGENYGYRDTVVYQCNPGFRLIGSSVRICQQDHNWSGQLPSCVPVSCGHPGSPIYGRTSGNGFNFNDVVTFSCNIGYLMQGPTKAQCQANRQWSHPPPMCKVVNCSDPGIPANSKRESKIEHGNFTYGTVVFYDCNPGYFLFGSSVLICQPNGQWDKPLPECIMIDCGHPGVPPNAVLSGEKYTFGSTVHYSCTGKRSLLGQSSRTCQLNGHWSGSQPHCSGDATGTCGDPGTPGHGSRQESNFRTKSTVRYACDTGYILHGSEERTCLANGSWTGRQPECKAVQCGNPGTTANGKVFRIDGTTFSSSVIYSCMEGYILSGPSVRQCTANGTWSGTLPNCTIISCGDPGIPANGLRYGDDYVVGQNVSYMCQPGYTMELNGSRIRTCTINGTWSGVMPTCRAVTCPTPPQISNGRLEGTNFDWGFSISYICSPGYELSFPAVLTCVGNGTWSGEVPQCLPKFCGDPGIPAQGKREGKSFIYQSEVSFSCNFPFILVGSSTRICQADGTWSGSSPHCIEPTQTSCENPGVPRHGSQNNTFGFQVGSVVQFHCKKGHLLQGSTTRTCLPDLTWSGIQPECIPHSCKQPETPAHANVVGMDLPSHGYTLIYTCQPGFFLAGGTEHRVCRSDNTWTGKVPICEAGSKILVKDPRPALGTPSPKLSVPDDVFAQNYIWKGSYNFKGRKQPMTLTVTSFNASTGRVNATLSNSNMELLLSGVYKSQEARLMLRIYLIKVPAHASVKKMKEENWAMDGFVSAEPDGATYVFQGFIQGKDYGQFGLQRLGLNMSEGSNSSNQPHGTNSSSVAIAILVPFFALIFAGFGFYLYKQRTAPKTQYTGCSVHENNNGQAAFENPMYDTNAKSVEGKAVRFDPNLNTVCTMV

SEQ ID NO: 20676 - protein, 2773 aa, Artificial Sequence
  Synthetic polypeptide
LPGKDYDLSPHPSPNSPQETGSKAPCGGHFSAPSGVILSPGWPGYYKDSLNCEWVIEAEPGHSIKITFERFQTELNYDVLEVHDGPNLLSPLLGSYNGTQVPQFLFSSSNFIYLLFTTDNSRSNNGFKIHYESVTVNTYSCLDPGIPVHGRRYGHDFSIGSTVSFSCDSGYRLSHEEPLLCEKNHWWSHPLPTCDALCGGDVRGPSGTILSPGYPEFYPNSLNCTWTVDVTHGKGVQFNFHTFHLEDHHDYLLITENGSFTQPLARLTGSDLPPTINAGLYGNFRAQLRFISDFSISYEGFNITFSEYNLEPCEDPGIPQYGSRIGFNFGIGDTLTFSCSSGYRLEGTSEIICLGGGRRVWSAPLPRCVAECGASATNNEGILLSPNYPLNYENNHECIYSIQVQAGKGINISARTFHLAQGDVLKIYDGKDKTTHLLGAFTGASMRGLTLSSTSNQLWLEFNSDTEGTDEGFQLVYTSFELSHCEDPGIPQFGYKISDQGHFAGSTIIYGCNPGYTLHGSSLLKCMTGERRAWDYPLPSCIAECGGRFKGESSGRILSPGYPFPYDNNLRCMWMIEVDPGNIVSLQFLAFDTEASHDILRVWDGPPENDMLLKEISGSLIPEGIHSTLNIVTIQFDTDFYISKSGFAIQFSSSVATACRDPGVPMNGTRNGDGREPGDTVVFQCDPGYELQGEERITCIQVENRYFWQPSPPVCIAPCGGNLTGSSGFILSPNFPHPYPHSRDCDWTITVNADYVISLAFISFSIEPNYDFLYIYDGPDSNSPLIGSFQDSKLPERIESSSNTMHLAFRSDGSVSYTGFHLEYKAKLRESCFDPGNIMNGTRLGMDYKLGSTVTYYCDAGYVLQGYSTLTCIMGDDGRPGWNRALPSCHAPCGSRSTGSEGTVLSPNYPKNYSVGHNCVYSIAVPKEFVVFGQFVFFQTSLHDVVEVYDGPTQQSSLLSSLSGSHSGESLPLSSGNQITIRFTSVGPITAKGFHFVYQAVPRTSSTQCSSVPEPRFGRRIGNEFAVGSSVLFDCNPGYILHGSIAIRCETVPNSLAQWNDSLPTCIVPCGGILTKRKGTILSPGYPEPYDNNLNCVWKITVPEGAGIQVQVVSFATEHNWDSLDFYDGGDNNAPRLGSYSGTTIPHLLNSTSNNLYLNFQSDISVSAAGFHLEYTAIGLDSCPEPQTPSSGIKIGDRYMVGDVVSFQCDQGYSLQGHSHITCMPGPVRRWNYPIPICLAQCGGAMSDFSGVILSPGFPGNYPSSLDCTWTINLPIGFGVHLQFVNFSTETIHDYLEVRSGSSETSTVIGRLSGPQIPSSLFSTTHETSLYFHSDYSQNKQGFHIVYQAYQLQSCPDPRPFRNGFVIGNDFTVGQTISFECFPGYTLIGNSALTCLHGVSRNWNHPLPRCEALCGGNITAMNGTIYSPGYPDEYPNFQDCFWLVRVPPGNGIYINFTVLQTEPIYDFITVWDGPDQNSPQIGQFSGNTALESVYSTSNQILIKFHSDFTTSGFFVLSYHAYQLRVCQPPPPVPNAEILTEDDEFEIGDIIRYQCLPGFTLVGNAILTCRLGERLQMDGAPPVCQVLCPANELRLDSTGVILSPGYPDSYPNLQMCAWSISVEKGYNITMFVEFFQTEKEFDVLQVYDGPNIQSPVLISLSGDYSSAFNITSNGHEVFLQWSADHGNNKKGFRIRYIAFYCSTPESPPHGYIISQTGGQLNSVVRWACDRGFRLVGKSSAVCRKSSYGYHAWDAPVPACQAISCGIPKAPTNGGILTTDYLVGTRVTYFCNDGYRLSSKELTTAVCQSDGTWSNHNKTPRCVVISCGELPTPPNGNKIGTQTSYGSTAIFTCDLGFMLVGSAVRECLSSGLWSESETRCLAGHCGIPELIVNGQVIGENYGYRDTVVYQCNPGFRLIGSSVRICQQDHNWSGQLPSCVPVSCGHPGSPIYGRTSGNGFNFNDVVTFSCNIGYLMQGPTKAQCQANRQWSHPPPMCKVVNCSDPGIPANSKRESKIEHGNFTYGTVVFYDCNPGYFLFGSSVLICQPNGQWDKPLPECIMIDCGHPGVPPNAVLSGEKYTFGSTVHYSCTGKRSLLGQSSRTCQLNGHWSGSQPHCSGDATGTCGDPGTPGHGSRQESNFRTKSTVRYACDTGYILHGSEERTCLANGSWTGRQPECKAVQCGNPGTTANGKVFRIDGTTFSSSVIYSCMEGYILSGPSVRQCTANGTWSGTLPNCTIISCGDPGIPANGLRYGDDYVVGQNVSYMCQPGYTMELNGSRIRTCTINGTWSGVMPTCRAVTCPTPPQISNGRLEGTNFDWGFSISYICSPGYELSFPAVLTCVGNGTWSGEVPQCLPKFCGDPGIPAQGKREGKSFIYQSEVSFSCNFPFILVGSSTRICQADGTWSGSSPHCIEPTQTSCENPGVPRHGSQNNTFGFQVGSVVQFHCKKGHLLQGSTTRTCLPDLTWSGIQPECIPHSCKQPETPAHANVVGMDLPSHGYTLIYTCQPGFFLAGGTEHRVCRSDNTWTGKVPICEAGSKILVKDPRPALGTPSPKLSVPDDVFAQNYIWKGSYNFKGRKQPMTLTVTSFNASTGRVNATLSNSNMELLLSGVYKSQEARLMLRIYLIKVPAHASVKKMKEENWAMDGFVSAEPDGATYVFQGFIQGKDYGQFGLQRLGLNMSEGSNSSNQPHGTNSSSVAIAILVPFFALIFAGFGFYLYKQRTAPKTQYTGCSVHENNNGQAAFENPMYDTNAKSVEGKAVRFDPNLNTVCTMV

SEQ ID NO: 20677 - protein, 2838 aa, Artificial Sequence
  Synthetic polypeptide
LPGKDYDLSPHPSPNSPQETGSKAPCGGHFSAPSGVILSPGWPGYYKDSLNCEWVIEAEPGHSIKITFERFQTELNYDVLEVHDGPNLLSPLLGSYNGTQVPQFLFSSSNFIYLLFTTDNSRSNNGFKIHYESVTVNTYSCLDPGIPVHGRRYGHDFSIGSTVSFSCDSGYRLSHEEPLLCEKNHWWSHPLPTCDALCGGDVRGPSGTILSPGYPEFYPNSLNCTWTVDVTHGKGVQFNFHTFHLEDHHDYLLITENGSFTQPLARLTGSDLPPTINAGLYGNFRAQLRFISDFSISYEGFNITFSEYNLEPCEDPGIPQYGSRIGFNFGIGDTLTFSCSSGYRLEGTSEIICLGGGRRVWSAPLPRCVAECGASATNNEGILLSPNYPLNYENNHECIYSIQVQAGKGINISARTFHLAQGDVLKIYDGKDKTTHLLGAFTGASMRGLTLSSTSNQLWLEFNSDTEGTDEGFQLVYTSFELSHCEDPGIPQFGYKISDQGHFAGSTIIYGCNPGYTLHGSSLLKCMTGERRAWDYPLPSCIAECGGRFKGESSGRILSPGYPFPYDNNLRCMWMIEVDPGNIVSLQFLAFDTEASHDILRVWDGPPENDMLLKEISGSLIPEGIHSTLNIVTIQFDTDFYISKSGFAIQFSSSVATACRDPGVPMNGTRNGDGREPGDTVVFQCDPGYELQGEERITCIQVENRYFWQPSPPVCIAPCGGNLTGSSGFILSPNFPHPYPHSRDCDWTITVNADYVISLAFISFSIEPNYDFLYIYDGPDSNSPLIGSFQDSKLPERIESSSNTMHLAFRSDGSVSYTGFHLEYKAKLRESCFDPGNIMNGTRLGMDYKLGSTVTYYCDAGYVLQGYSTLTCIMGDDGRPGWNRALPSCHAPCGSRSTGSEGTVLSPNYPKNYSVGHNCVYSIAVPKEFVVFGQFVFFQTSLHDVVEVYDGPTQQSSLLSSLSGSHSGESLPLSSGNQITIRFTSVGPITAKGFHFVYQAVPRTSSTQCSSVPEPRFGRRIGNEFAVGSSVLFDCNPGYILHGSIAIRCETVPNSLAQWNDSLPTCIVPCGGILTKRKGTILSPGYPEPYDNNLNCVWKITVPEGAGIQVQVVSFATEHNWDSLDFYDGGDNNAPRLGSYSGTTIPHLLNSTSNNLYLNFQSDISVSAAGFHLEYTAIGLDSCPEPQTPSSGIKIGDRYMVGDVVSFQCDQGYSLQGHSHITCMPGPVRRWNYPIPICLAQCGGAMSDFSGVILSPGFPGNYPSSLDCTWTINLPIGFGVHLQFVNFSTETIHDYLEVRSGSSETSTVIGRLSGPQIPSSLFSTTHETSLYFHSDYSQNKQGFHIVYQAYQLQSCPDPRPFRNGFVIGNDFTVGQTISFECFPGYTLIGNSALTCLHGVSRNWNHPLPRCEALCGGNITAMNGTIYSPGYPDEYPNFQDCFWLVRVPPGNGIYINFTVLQTEPIYDFITVWDGPDQNSPQIGQFSGNTALESVYSTSNQILIKFHSDFTTSGFFVLSYHAYQLRVCQPPPPVPNAEILTEDDEFEIGDIIRYQCLPGFTLVGNAILTCRLGERLQMDGAPPVCQVLCPANELRLDSTGVILSPGYPDSYPNLQMCAWSISVEKGYNITMFVEFFQTEKEFDVLQVYDGPNIQSPVLISLSGDYSSAFNITSNGHEVFLQWSADHGNNKKGFRIRYIAFYCSTPESPPHGYIISQTGGQLNSVVRWACDRGFRLVGKSSAVCRKSSYGYHAWDAPVPACQAISCGIPKAPTNGGILTTDYLVGTRVTYFCNDGYRLSSKELTTAVCQSDGTWSNHNKTPRCVVVTCPSINSFILEHGRWRIVNGSHYEYKTKVVFSCDPGYHGLGPASIECLPNGTWSWRNERPYCQIISCGELPTPPNGNKIGTQTSYGSTAIFTCDLGFMLVGSAVRECLSSGLWSESETRCLAGHCGIPELIVNGQVIGENYGYRDTVVYQCNPGFRLIGSSVRICQQDHNWSGQLPSCVPVSCGHPGSPIYGRTSGNGFNFNDVVTFSCNIGYLMQGPTKAQCQANRQWSHPPPMCKVVNCSDPGIPANSKRESKIEHGNFTYGTVVFYDCNPGYFLFGSSVLICQPNGQWDKPLPECIMIDCGHPGVPPNAVLSGEKYTFGSTVHYSCTGKRSLLGQSSRTCQLNGHWSGSQPHCSGDATGTCGDPGTPGHGSRQESNFRTKSTVRYACDTGYILHGSEERTCLANGSWTGRQPECKAVQCGNPGTTANGKVFRIDGTTFSSSVIYSCMEGYILSGPSVRQCTANGTWSGTLPNCTIISCGDPGIPANGLRYGDDYVVGQNVSYMCQPGYTMELNGSRIRTCTINGTWSGVMPTCRAVTCPTPPQISNGRLEGTNFDWGFSISYICSPGYELSFPAVLTCVGNGTWSGEVPQCLPKFCGDPGIPAQGKREGKSFIYQSEVSFSCNFPFILVGSSTRICQADGTWSGSSPHCIEPTQTSCENPGVPRHGSQNNTFGFQVGSVVQFHCKKGHLLQGSTTRTCLPDLTWSGIQPECIPHSCKQPETPAHANVVGMDLPSHGYTLIYTCQPGFFLAGGTEHRVCRSDNTWTGKVPICEAGSKILVKDPRPALGTPSPKLSVPDDVFAQNYIWKGSYNFKGRKQPMTLTVTSFNASTGRVNATLSNSNMELLLSGVYKSQEARLMLRIYLIKVPAHASVKKMKEENWAMDGFVSAEPDGATYVFQGFIQGKDYGQFGLQRLGLNMSEGSNSSNQPHGTNSSSVAIAILVPFFALIFAGFGFYLYKQRTAPKTQYTGCSVHENNNGQAAFENPMYDTNAKSVEGKAVRFDPNLNTVCTMV

SEQ ID NO: 20678 - protein, 52 aa, Artificial Sequence
  Synthetic polypeptide
QKRGTSDQTKVCKESNNFQERTMTFHLIPALTHHRKQDLKPHVVAIFQLPVE

SEQ ID NO: 20679 - protein, 29 aa, Artificial Sequence
  Synthetic polypeptide
SPMWWPFFSSQWSDSLTRMARILQRLFEL

SEQ ID NO: 20680 - protein, 14 aa, Artificial Sequence
  Synthetic polypeptide
ICFVIPVWNSNRNR

SEQ ID NO: 20681 - protein, 358 aa, Artificial Sequence
  Synthetic polypeptide
RPSFELNLLCDTCVELQQKPVNKDQCPRERPEELESGGMYHCHSGSKPTEKGANEYAYAKWKLCSASAICFIFMIAEVVGGHIAGSLAVVTDAAHLLIDLTSFLLSLFSLWLSSKPPSKRLTFGWHRAEILGALLSILCIWVVTGVLVYLACERLLYPDYQIQATVMIIVSSCAVAANIVLTVVLHQRCLGHNHKEVQANASVRAAFVHALGDLFQSISVLISALIIYFKPEYKIADPICTFIFSILVLASTITILKDFSILLMEGVPKSLNYSGVKELILAVDGVLSVHSLHIWSLTMNQVILSAHVATAASRDSQVVRREIAKALSKSFTMHSLTIQMESPVDQDPDCLFCEDPCD

SEQ ID NO: 20682 - protein, 11 aa, Artificial Sequence
  Synthetic polypeptide
YLCGTPTETGE

SEQ ID NO: 20683 - protein, 52 aa, Artificial Sequence; identical to SEQ ID NO: 5077
  Synthetic polypeptide

SEQ ID NO: 20684 - protein, 285 aa, Artificial Sequence; identical to SEQ ID NO: 2551
  Synthetic polypeptide

SEQ ID NO: 20685 - protein, 31 aa, Artificial Sequence; identical to SEQ ID NO: 6392
  Synthetic polypeptide

SEQ ID NO: 20686 - protein, 19 aa, Artificial Sequence
  Synthetic polypeptide
YLVGTLLGVLLLSQMLPTS

SEQ ID NO: 20687 - protein, 80 aa, Artificial Sequence
  Synthetic polypeptide
CLMILIRHHHPQMGPSSCSKTSAGLPLILHYGWSIQVQERDHPRLVWICPLQRELVPGKGLKHISSEQRPAGTSPTGQGA

SEQ ID NO: 20688 - protein, 33 aa, Artificial Sequence
  Synthetic polypeptide
FYIMAGPFRSRKGITPGWCGSVLCNANWYQARD

SEQ ID NO: 20689 - protein, 171 aa, Artificial Sequence
  Synthetic polypeptide
NKRRAPTDSTLWLVHSGPGKGSPQAGVDLSFATRTGTRQGIETHLFRAETSRDLSHWTRSIVQGCHNSAELIAEISTACTYKNQECRLTIHYENGFSITTEPQEGAFPKTIIQSPYEKLKMSSDDGIRMLYLDFGGKDGEIQLDLHSCPKPIVFIIHSFLSAKITRLGLVA

SEQ ID NO: 20690 - protein, 375 aa, Artificial Sequence
  Synthetic polypeptide
INFPLCRFVLRSKGTKYVKQLTHCPEFVKYMREATPYVKKGSPVSEIGWETPPPESPRLGGSTSDPPSSQSFSFHRDRKSIPLKMCYVTRSMALADPENRQLEIHSPDAKHTVILRSKDSATAQAWFSAIHSNVNDLLTRVIAEVREQLGKTGIAGSREIRHLGWLAEKVPGESKKQWKPALVVLTEKDLLIYDSMPRRKEAWFSPVHTYPLLATRLVHSGPGKGSPQAGVDLSFATRTGTRQGIETHLFRAETSRDLSHWTRSIVQGCHNSAELIAEISTACTYKNQECRLTIHYENGFSITTEPQEGAFPKTIIQSPYEKLKMSSDDGIRMLYLDFGGKDGEIQLDLHSCPKPIVFIIHSFLSAKITRLGLVA

SEQ ID NO: 20691 - protein, 38 aa, Artificial Sequence
  Synthetic polypeptide
VCKTVNSLPGICEVHARSHALCEERIPSIRDWVGNTSA

SEQ ID NO: 20692 - protein, 612 aa, Artificial Sequence
  Synthetic polypeptide
AVGEEGLGITQELITAWYIGFLTLILSSFLVYLVEKDVPEVDAQGEEMKEEFETYADALWWGLITLATIGYGDKTPKTWEGRLIAATFSLIGVSFFALPAGILGSGLALKVQEQHRQKHFEKRRKPAAELIQAAWRYYATNPNRIDLVATWRFYESVVSFPFFRKEQLEAASSQKLGLLDRVRLSNPRGSNTKGKLFTPLNVDAIEESPSKEPKPVGLNNKERFRTAFRMKAYAFWQSSEDAGTGDPMAEDRGYGNDFPIEDMIPTLKAAIRAVRILQFRLYKKKFKETLRPYDVKDVIEQYSAGHLDMLSRIKYLQTRIDMIFTPGPPSTPKHKKSQKGNEPYVARPSTSEIEDQSMMGKFVKVERQVQDMGKKLDFLVDMHMQHMERLQVQVTEYYPTKGTSSPAEAEKKEDNRYSDLKTIICNYSETGPPEPPYSFHQVTIDKVSPYGFFAHDPVNLPRGGPSSGKVQATPPSSATTYVERPTVLPILTLLDSRVSCHSQADLQGPYSDRISPRQRRSITRDSDTPLSLMSVNHEELERSPSGFSISQDRDDYVFGPNGGSSWMREKRYLAEGETDTDTDPFTPSGSMPLSSTGDGISDSVWTPSNKPI

SEQ ID NO: 20693 - protein, 624 aa, Artificial Sequence
  Synthetic polypeptide
AVGEEGLGITQELITAWYIGFLTLILSSFLVYLVEKDVPEVDAQGEEMKEEFETYADALWWGLITLATIGYGDKTPKTWEGRLIAATFSLIGVSFFALPAGILGSGLALKVQEQHRQKHFEKRRKPAAELIQAAWRYYATNPNRIDLVATWRFYESVVSFPFFRKEQLEAASSQKLGLLDRVRLSNPRGSNTKGKLFTPLNVDAIEESPSKEPKPVGLNNKERFRTAFRMKAYAFWQSSEDAGTGDPMAEDRGYGNDFPIEDMIPTLKAAIRAVRILQFRLYKKKFKETLRPYDVKDVIEQYSAGHLDMLSRIKYLQTRIDMIFTPGPPSTPKHKKSQKGSAFTFPSQQSPRNEPYVARPSTSEIEDQSMMGKFVKVERQVQDMGKKLDFLVDMHMQHMERLQVQVTEYYPTKGTSSPAEAEKKEDNRYSDLKTIICNYSETGPPEPPYSFHQVTIDKVSPYGFFAHDPVNLPRGGPSSGKVQATPPSSATTYVERPTVLPILTLLDSRVSCHSQADLQGPYSDRISPRQRRSITRDSDTPLSLMSVNHEELERSPSGFSISQDRDDYVFGPNGGSSWMREKRYLAEGETDTDTDPFTPSGSMPLSSTGDGISDSVWTPSNKPI

SEQ ID NO: 20694 - protein, 34 aa, Artificial Sequence
  Synthetic polypeptide
CSGRRRLGDHTGTHHGLVHRFPDTHPFFISCLPG

SEQ ID NO: 20695 - protein, 21 aa, Artificial Sequence
  Synthetic polypeptide
QWEKKAWGSHRNSSRPGTSVS

SEQ ID NO: 20696 - protein, 9 aa, Artificial Sequence
  Synthetic polypeptide
GLPSHVELH

SEQ ID NO: 20697 - protein, 78 aa, Artificial Sequence; identical to SEQ ID NO: 4002
  Synthetic polypeptide

SEQ ID NO: 20698 - protein, 169 aa, Artificial Sequence; identical to SEQ ID NO: 3021
  Synthetic polypeptide

SEQ ID NO: 20699 - protein, 99 aa, Artificial Sequence
  Synthetic polypeptide
RKEVGLALRTLLATVDETIPLLPASTHREIEMAQKLLNSDLGELINKMKLAQQYVMTSLQQEYKKQMLTAAHALAVDAKNLLDVIDQARLKMLGQTRPH

SEQ ID NO: 20700 - protein, 44 aa, Artificial Sequence
  Synthetic polypeptide
SCVRLREMWLRCWSAKTSRGMIIIKFRSRTCKEEPAEERKSAWP

SEQ ID NO: 20701 - protein, 31 aa, Artificial Sequence
  Synthetic polypeptide
SLSNSDPAPVRRSQLKKGSRLGPEDIIGHCG

SEQ ID NO: 20702 - protein, 115 aa, Artificial Sequence
  Synthetic polypeptide
KISDVKTWEGHVSPAAAHLDTMSYLEESTIQLSCKAGLNTFFHGRPALLERTAGRHTVQSCIFGRHFLKRERAQQTGLSQSEVQRRILSQPTAHGTNQSLPGFWLPWFTWNHSHG

SEQ ID NO: 20703 - protein, 134 aa, Artificial Sequence
  Synthetic polypeptide
KISDVKTWEGHVSPAAAHLDTMSYLEESTIQLSCKAGLNTFFHGRPALLERTAGRHTVQSCIFGRHFLKRERAQQTGLSQSEVQRRILSQPTAHGTNQSLPGFWLPWFTWNHSHGWQHLSRSGISFGPNRFMES

SEQ ID NO: 20704 - protein, 147 aa, Artificial Sequence
  Synthetic polypeptide
KISDVKTWEGHVSPAAAHLDTMSYLEESTIQLSCKAGLNTFFHGRPALLERTAGRHTVQSCIFGRHFLKRERAQQTGLSQSEVQRRILSQPTAHGTNQSLPGLYSIGPARDWASVANPSDGRASNPTATGNGRRSALAGKRGKISET

SEQ ID NO: 20705 - protein, 51 aa, Artificial Sequence
  Synthetic polypeptide
TFSQKRKSPADRVIPVRGPAKDFIPAHSTWYKPIITRFLATLVHMESQPWL

SEQ ID NO: 20706 - protein, 74 aa, Artificial Sequence
  Synthetic polypeptide
TFSQKRKSPADRVIPVRGPAKDFIPAHSTWYKPIITRFLATLVHMESQPWLAASIQVRHLFWTKQIHGIIDLRR

SEQ ID NO: 20707 - protein, 54 aa, Artificial Sequence
  Synthetic polypeptide
TFSQKRKSPADRVIPVRGPAKDFIPAHSTWYKPIITRTLQYWTCEGLGKCCQPI

SEQ ID NO: 20708 - protein, 326 aa, Artificial Sequence
  Synthetic polypeptide
TLFFMEDQLYLKEQLADILFRVAYLVDIFSKEKEPSRPGYPSPRSSEGFYPSPQHMVQTNHYQDSTVLDLRGIGQVLPTHLMEERLIRQQQEMEEDQRWLEKEERFLKPDVRLSRGSIDREDGSLQGPIGNQHIYQPVGKPDPAAPPKKPPRPGAPGHLGSLASLSSPADSYNEGVKLQPQEISPPPTANLDRSNDKVYENVTGLVKAVIEMSSKIQPAPPEEYVPMVKEVGLALRTLLATVDETIPLLPASTHREIEMAQKLLNSDLGELINKMKLAQQYVMTSLQQEYKKQMLTAAHALAVDAKNLLDVIDQARLKMLGQTRPH

SEQ ID NO: 20709 - protein, 77 aa, Artificial Sequence
  Synthetic polypeptide
TLFFMEDQLYLKEQLADILFRVAYLVDIFSKEKEPSRPGYPSPRSSEGFYPSPQHMVQTNHYQVSGYPGSHGITAMA

SEQ ID NO: 20710 - protein, 142 aa, Artificial Sequence
  Synthetic polypeptide
TLFFMEDQLYLKEQLADILFRVAYLVDIFSKEKEPSRPGYPSPRSSEGFYPSPQHMVQTNHYQVSGYPGSHGITAMAGSIYPGQASLLDQTDSWNHRPQEIAMWQPNVEDSTVLDLRGIGQVLPTHLMEERLIRQQQEMEED

SEQ ID NO: 20711 - protein, 143 aa, Artificial Sequence
  Synthetic polypeptide
TLFFMEDQLYLKEQLADILFRVAYLVDIFSKEKEPSRPGYPSPRSSEGFYPSPQHMVQTNHYQVSGYPGSHGITAMAGSIYPGQASLLDQTDSWNHRPQEIAMWQPNVEDSTVLDLRGIGQVLPTHLMEERLIRQQQEMEEDQ

SEQ ID NO: 20712 - protein, 372 aa, Artificial Sequence
  Synthetic polypeptide
TLFFMEDQLYLKEQLADILFRVAYLVDIFSKEKEPSRPGYPSPRSSEGFYPSPQHMVQTNHYQVSGYPGSHGITAMAGSIYPGQASLLDQTDSWNHRPQEIAMWQPNVEDSTVLDLRGIGQVLPTHLMEERLIRQQQEMEEDQRWLEKEERFLKPDVRLSRGSIDREDGSLQGPIGNQHIYQPVGKPDPAAPPKKPPRPGAPGHLGSLASLSSPADSYNEGVKLQPQEISPPPTANLDRSNDKVYENVTGLVKAVIEMSSKIQPAPPEEYVPMVKEVGLALRTLLATVDETIPLLPASTHREIEMAQKLLNSDLGELINKMKLAQQYVMTSLQQEYKKQMLTAAHALAVDAKNLLDVIDQARLKMLGQTRPH

SEQ ID NO: 20713 - protein, 375 aa, Artificial Sequence
  Synthetic polypeptide
TLFFMEDQLYLKEQLADILFRVAYLVDIFSKEKEPSRPGYPSPRSSEGFYPSPQHMVQTNHYQVSGYPGSHGITAMAGSIYPGQASLLDQTDSWNHRPQEIAMWQPNVEDSTVLDLRGIGQVLPTHLMEERLIRQQQEMEEDQRWLEKEERFLKPDVRLSRGSIDREDGSLQGPIGNQHIYQPVGKPDPAAPPKKPPRPGAPGHLGSLASLSSPADSYNEGVKPWRLQPQEISPPPTANLDRSNDKVYENVTGLVKAVIEMSSKIQPAPPEEYVPMVKEVGLALRTLLATVDETIPLLPASTHREIEMAQKLLNSDLGELINKMKLAQQYVMTSLQQEYKKQMLTAAHALAVDAKNLLDVIDQARLKMLGQTRPH

SEQ ID NO: 20714 - protein, 385 aa, Artificial Sequence
  Synthetic polypeptide
TLFFMEDQLYLKEQLADILFRVAYLVDIFSKEKEPSRPGYPSPRSSEGFYPSPQHMVQTNHYQVSGYPGSHGITAMAGSIYPGQASLLDQTDSWNHRPQEIAMWQPNVEDSTVLDLRGIGQVLPTHLMEERLIRQQQEMEEDQRWLEKEERFLKPDVRLSRGSIDREDGSLQGPIGNQHIYQPVGKPGKEEKNWAERNPAAPPKKPPRPGAPGHLGSLASLSSPADSYNEGVKPNQLQPQEISPPPTANLDRSNDKVYENVTGLVKAVIEMSSKIQPAPPEEYVPMVKEVGLALRTLLATVDETIPLLPASTHREIEMAQKLLNSDLGELINKMKLAQQYVMTSLQQEYKKQMLTAAHALAVDAKNLLDVIDQARLKMLGQTRPH

SEQ ID NO: 20715 - protein, 385 aa, Artificial Sequence
  Synthetic polypeptide
TLFFMEDQLYLKEQLADILFRVAYLVDIFSKEKEPSRPGYPSPRSSEGFYPSPQHMVQTNHYQVSGYPGSHGITAMAGSIYPGQASLLDQTDSWNHRPQEIAMWQPNVEDSTVLDLRGIGQVLPTHLMEERLIRQQQEMEEDQRWLEKEERFLKPDVRLSRGSIDREDGSLQGPIGNQHIYQPVGKPGKEEKNWAERNPAAPPKKPPRPGAPGHLGSLASLSSPADSYNEGVKPWRLQPQEISPPPTANLDRSNDKVYENVTGLVKAVIEMSSKIQPAPPEEYVPMVKEVGLALRTLLATVDETIPLLPASTHREIEMAQKLLNSDLGELINKMKLAQQYVMTSLQQEYKKQMLTAAHALAVDAKNLLDVIDQARLKMLGQTRPH

SEQ ID NO: 20716 - protein, 31 aa, Artificial Sequence
  Synthetic polypeptide
EAEVGGSLQPRSSRPAWHNPGGREGSARRAH

SEQ ID NO: 20717 - protein, 48 aa, Artificial Sequence
  Synthetic polypeptide
EAEVGGSLQPRSSRPAWHNPGGREGSARRAHEDGVQKTGHSVLGLRRV

SEQ ID NO: 20718 - protein, 28 aa, Artificial Sequence
  Synthetic polypeptide
GGRITPAQEFKTSLAQSWRKRRLSKKSA

SEQ ID NO: 20719 - protein, 36 aa, Artificial Sequence
  Synthetic polypeptide
SQYFERLRWEDHSSPGVQDQPGTILEEEKAQQEERM

SEQ ID NO: 20720 - protein, 351 aa, Artificial Sequence
  Synthetic polypeptide
SQYFERLRWEDHSSPGVQDQPGTILEEEKAQQEERMRMESRRQATVSWDSGGSDEAPPKPSRPGYPSPRSSEGFYPSPQHMVQTNHYQDSTVLDLRGIGQVLPTHLMEERLIRQQQEMEEDQRWLEKEERFLKPDVRLSRGSIDREDGSLQGPIGNQHIYQPVGKPDPAAPPKKPPRPGAPGHLGSLASLSSPADSYNEGVKLQPQEISPPPTANLDRSNDKVYENVTGLVKAVIEMSSKIQPAPPEEYVPMVKEVGLALRTLLATVDETIPLLPASTHREIEMAQKLLNSDLGELINKMKLAQQYVMTSLQQEYKKQMLTAAHALAVDAKNLLDVIDQARLKMLGQTRPH

SEQ ID NO: 20721 - protein, 397 aa, Artificial Sequence
  Synthetic polypeptide
SQYFERLRWEDHSSPGVQDQPGTILEEEKAQQEERMRMESRRQATVSWDSGGSDEAPPKPSRPGYPSPRSSEGFYPSPQHMVQTNHYQVSGYPGSHGITAMAGSIYPGQASLLDQTDSWNHRPQEIAMWQPNVEDSTVLDLRGIGQVLPTHLMEERLIRQQQEMEEDQRWLEKEERFLKPDVRLSRGSIDREDGSLQGPIGNQHIYQPVGKPDPAAPPKKPPRPGAPGHLGSLASLSSPADSYNEGVKLQPQEISPPPTANLDRSNDKVYENVTGLVKAVIEMSSKIQPAPPEEYVPMVKEVGLALRTLLATVDETIPLLPASTHREIEMAQKLLNSDLGELINKMKLAQQYVMTSLQQEYKKQMLTAAHALAVDAKNLLDVIDQARLKMLGQTRPH

SEQ ID NO: 20722 - protein, 400 aa, Artificial Sequence
  Synthetic polypeptide
SQYFERLRWEDHSSPGVQDQPGTILEEEKAQQEERMRMESRRQATVSWDSGGSDEAPPKPSRPGYPSPRSSEGFYPSPQHMVQTNHYQVSGYPGSHGITAMAGSIYPGQASLLDQTDSWNHRPQEIAMWQPNVEDSTVLDLRGIGQVLPTHLMEERLIRQQQEMEEDQRWLEKEERFLKPDVRLSRGSIDREDGSLQGPIGNQHIYQPVGKPDPAAPPKKPPRPGAPGHLGSLASLSSPADSYNEGVKPWRLQPQEISPPPTANLDRSNDKVYENVTGLVKAVIEMSSKIQPAPPEEYVPMVKEVGLALRTLLATVDETIPLLPASTHREIEMAQKLLNSDLGELINKMKLAQQYVMTSLQQEYKKQMLTAAHALAVDAKNLLDVIDQARLKMLGQTRPH

SEQ ID NO: 20723 - protein, 410 aa, Artificial Sequence
  Synthetic polypeptide
SQYFERLRWEDHSSPGVQDQPGTILEEEKAQQEERMRMESRRQATVSWDSGGSDEAPPKPSRPGYPSPRSSEGFYPSPQHMVQTNHYQVSGYPGSHGITAMAGSIYPGQASLLDQTDSWNHRPQEIAMWQPNVEDSTVLDLRGIGQVLPTHLMEERLIRQQQEMEEDQRWLEKEERFLKPDVRLSRGSIDREDGSLQGPIGNQHIYQPVGKPGKEEKNWAERNPAAPPKKPPRPGAPGHLGSLASLSSPADSYNEGVKPNQLQPQEISPPPTANLDRSNDKVYENVTGLVKAVIEMSSKIQPAPPEEYVPMVKEVGLALRTLLATVDETIPLLPASTHREIEMAQKLLNSDLGELINKMKLAQQYVMTSLQQEYKKQMLTAAHALAVDAKNLLDVIDQARLKMLGQTRPH

SEQ ID NO: 20724 - protein, 410 aa, Artificial Sequence
  Synthetic polypeptide
SQYFERLRWEDHSSPGVQDQPGTILEEEKAQQEERMRMESRRQATVSWDSGGSDEAPPKPSRPGYPSPRSSEGFYPSPQHMVQTNHYQVSGYPGSHGITAMAGSIYPGQASLLDQTDSWNHRPQEIAMWQPNVEDSTVLDLRGIGQVLPTHLMEERLIRQQQEMEEDQRWLEKEERFLKPDVRLSRGSIDREDGSLQGPIGNQHIYQPVGKPGKEEKNWAERNPAAPPKKPPRPGAPGHLGSLASLSSPADSYNEGVKPWRLQPQEISPPPTANLDRSNDKVYENVTGLVKAVIEMSSKIQPAPPEEYVPMVKEVGLALRTLLATVDETIPLLPASTHREIEMAQKLLNSDLGELINKMKLAQQYVMTSLQQEYKKQMLTAAHALAVDAKNLLDVIDQARLKMLGQTRPH

SEQ ID NO: 20725 - protein, 184 aa, Artificial Sequence
  Synthetic polypeptide
AGCSGSCLYSQHSGITLESRSLRPAWATWQNLISTKETDDYAEIIDEEDTYTMPSKSYGIDEARDYEIQRERIELGRCIGEGQFGDVHQGIYMSPENPALAVAIKTCKNCTSDSVREKFLQEALTMRQFDHPHIVKLIGVITENPVWIIMELCTLGELRSFLQVRKYSLDLASLILYAYQLSTA

SEQ ID NO: 20726 - protein, 703 aa, Artificial Sequence
  Synthetic polypeptide
AGCSGSCLYSQHSGITLESRSLRPAWATWQNLISTKETDDYAEIIDEEDTYTMPSKSYGIDEARDYEIQRERIELGRCIGEGQFGDVHQGIYMSPENPALAVAIKTCKNCTSDSVREKFLQEALTMRQFDHPHIVKLIGVITENPVWIIMELCTLGELRSFLQVRKYSLDLASLILYAYQLSTALAYLESKRFVHRDIAARNVLVSSNDCVKLGDFGLSRYMEDSTYYKASKGKLPIKWMAPESINFRRFTSASDVWMFGVCMWEILMHGVKPFQGVKNNDVIGRIENGERLPMPPNCPPTLYSLMTKCWAYDPSRRPRFTELKAQLSTILEEEKAQQEERMRMESRRQATVSWDSGGSDEAPPKPSRPGYPSPRSSEGFYPSPQHMVQTNHYQVSGYPGSHGITAMAGSIYPGQASLLDQTDSWNHRPQEIAMWQPNVEDSTVLDLRGIGQVLPTHLMEERLIRQQQEMEEDQRWLEKEERFLKPDVRLSRGSIDREDGSLQGPIGNQHIYQPVGKPDPAAPPKKPPRPGAPGHLGSLASLSSPADSYNEGVKLQPQEISPPPTANLDRSNDKVYENVTGLVKAVIEMSSKIQPAPPEEYVPMVKEVGLALRTLLATVDETIPLLPASTHREIEMAQKLLNSDLGELINKMKLAQQYVMTSLQQEYKKQMLTAAHALAVDAKNLLDVIDQARLKMLGQTRPH

SEQ ID NO: 20727 - protein, 108 aa, Artificial Sequence
  Synthetic polypeptide
AGCSGSCLYSQHSGITLESRSLRPAWATWQNLISTKETDDYAEIIDEEDTYTMPSTRDYEIQRERIELGRCIGEGQFGDVHQGGPGLLNLKLSSAQSWRKRRLSKKSA

SEQ ID NO: 20728 - protein, 88 aa, Artificial Sequence
  Synthetic polypeptide
AGCSGSCLYSQHSGITLESRSLRPAWATWQNLISTKETDDYAEIIDEEDTYTMPSTRDYEIQRERIELGRCIGEGQFGDVHQGIYMSP

SEQ ID NO: 20729 - protein, 150 aa, Artificial Sequence
  Synthetic polypeptide
AGCSGSCLYSQHSGITLESRSLRPAWATWQNLISTKETDDYAEIIDEEDTYTMPSTRDYEIQRERIELGRCIGEGQFGDVHQGIYMSPENPALAVAIKTCKNCTSDSVREKFLQEACHYTSLHWNWCRYISDPNVDAAQTPGMQSNNASV

SEQ ID NO: 20730 - protein, 650 aa, Artificial Sequence
  Synthetic polypeptide
AGCSGSCLYSQHSGITLESRSLRPAWATWQNLISTKETDDYAEIIDEEDTYTMPSTRDYEIQRERIELGRCIGEGQFGDVHQGIYMSPENPALAVAIKTCKNCTSDSVREKFLQEALTMRQFDHPHIVKLIGVITENPVWIIMELCTLGELRSFLQVRKYSLDLASLILYAYQLSTALAYLESKRFVHRDIAARNVLVSSNDCVKLGDFGLSRYMEDSTYYKASKGKLPIKWMAPESINFRRFTSASDVWMFGVCMWEILMHGVKPFQGVKNNDVIGRIENGERLPMPPNCPPTLYSLMTKCWAYDPSRRPRFTELKAQLSTILEEEKAQQEERMRMESRRQATVSWDSGGSDEAPPKPSRPGYPSPRSSEGFYPSPQHMVQTNHYQDSTVLDLRGIGQVLPTHLMEERLIRQQQEMEEDQRWLEKEERFLKPDVRLSRGSIDREDGSLQGPIGNQHIYQPVGKPDPAAPPKKPPRPGAPGHLGSLASLSSPADSYNEGVKLQPQEISPPPTANLDRSNDKVYENVTGLVKAVIEMSSKIQPAPPEEYVPMVKEVGLALRTLLATVDETIPLLPASTHREIEMAQKLLNSDLGELINKMKLAQQYVMTSLQQEYKKQMLTAAHALAVDAKNLLDVIDQARLKMLGQTRPH

SEQ ID NO: 20731 - protein, 696 aa, Artificial Sequence
  Synthetic polypeptide
AGCSGSCLYSQHSGITLESRSLRPAWATWQNLISTKETDDYAEIIDEEDTYTMPSTRDYEIQRERIELGRCIGEGQFGDVHQGIYMSPENPALAVAIKTCKNCTSDSVREKFLQEALTMRQFDHPHIVKLIGVITENPVWIIMELCTLGELRSFLQVRKYSLDLASLILYAYQLSTALAYLESKRFVHRDIAARNVLVSSNDCVKLGDFGLSRYMEDSTYYKASKGKLPIKWMAPESINFRRFTSASDVWMFGVCMWEILMHGVKPFQGVKNNDVIGRIENGERLPMPPNCPPTLYSLMTKCWAYDPSRRPRFTELKAQLSTILEEEKAQQEERMRMESRRQATVSWDSGGSDEAPPKPSRPGYPSPRSSEGFYPSPQHMVQTNHYQVSGYPGSHGITAMAGSIYPGQASLLDQTDSWNHRPQEIAMWQPNVEDSTVLDLRGIGQVLPTHLMEERLIRQQQEMEEDQRWLEKEERFLKPDVRLSRGSIDREDGSLQGPIGNQHIYQPVGKPDPAAPPKKPPRPGAPGHLGSLASLSSPADSYNEGVKLQPQEISPPPTANLDRSNDKVYENVTGLVKAVIEMSSKIQPAPPEEYVPMVKEVGLALRTLLATVDETIPLLPASTHREIEMAQKLLNSDLGELINKMKLAQQYVMTSLQQEYKKQMLTAAHALAVDAKNLLDVIDQARLKMLGQTRPH

SEQ ID NO: 20732 - protein, 699 aa, Artificial Sequence
  Synthetic polypeptide
AGCSGSCLYSQHSGITLESRSLRPAWATWQNLISTKETDDYAEIIDEEDTYTMPSTRDYEIQRERIELGRCIGEGQFGDVHQGIYMSPENPALAVAIKTCKNCTSDSVREKFLQEALTMRQFDHPHIVKLIGVITENPVWIIMELCTLGELRSFLQVRKYSLDLASLILYAYQLSTALAYLESKRFVHRDIAARNVLVSSNDCVKLGDFGLSRYMEDSTYYKASKGKLPIKWMAPESINFRRFTSASDVWMFGVCMWEILMHGVKPFQGVKNNDVIGRIENGERLPMPPNCPPTLYSLMTKCWAYDPSRRPRFTELKAQLSTILEEEKAQQEERMRMESRRQATVSWDSGGSDEAPPKPSRPGYPSPRSSEGFYPSPQHMVQTNHYQVSGYPGSHGITAMAGSIYPGQASLLDQTDSWNHRPQEIAMWQPNVEDSTVLDLRGIGQVLPTHLMEERLIRQQQEMEEDQRWLEKEERFLKPDVRLSRGSIDREDGSLQGPIGNQHIYQPVGKPDPAAPPKKPPRPGAPGHLGSLASLSSPADSYNEGVKPWRLQPQEISPPPTANLDRSNDKVYENVTGLVKAVIEMSSKIQPAPPEEYVPMVKEVGLALRTLLATVDETIPLLPASTHREIEMAQKLLNSDLGELINKMKLAQQYVMTSLQQEYKKQMLTAAHALAVDAKNLLDVIDQARLKMLGQTRPH

SEQ ID NO: 20733 - protein, 709 aa, Artificial Sequence
  Synthetic polypeptide
AGCSGSCLYSQHSGITLESRSLRPAWATWQNLISTKETDDYAEIIDEEDTYTMPSTRDYEIQRERIELGRCIGEGQFGDVHQGIYMSPENPALAVAIKTCKNCTSDSVREKFLQEALTMRQFDHPHIVKLIGVITENPVWIIMELCTLGELRSFLQVRKYSLDLASLILYAYQLSTALAYLESKRFVHRDIAARNVLVSSNDCVKLGDFGLSRYMEDSTYYKASKGKLPIKWMAPESINFRRFTSASDVWMFGVCMWEILMHGVKPFQGVKNNDVIGRIENGERLPMPPNCPPTLYSLMTKCWAYDPSRRPRFTELKAQLSTILEEEKAQQEERMRMESRRQATVSWDSGGSDEAPPKPSRPGYPSPRSSEGFYPSPQHMVQTNHYQVSGYPGSHGITAMAGSIYPGQASLLDQTDSWNHRPQEIAMWQPNVEDSTVLDLRGIGQVLPTHLMEERLIRQQQEMEEDQRWLEKEERFLKPDVRLSRGSIDREDGSLQGPIGNQHIYQPVGKPGKEEKNWAERNPAAPPKKPPRPGAPGHLGSLASLSSPADSYNEGVKPNQLQPQEISPPPTANLDRSNDKVYENVTGLVKAVIEMSSKIQPAPPEEYVPMVKEVGLALRTLLATVDETIPLLPASTHREIEMAQKLLNSDLGELINKMKLAQQYVMTSLQQEYKKQMLTAAHALAVDAKNLLDVIDQARLKMLGQTRPH

SEQ ID NO: 20734 - protein, 709 aa, Artificial Sequence
  Synthetic polypeptide
AGCSGSCLYSQHSGITLESRSLRPAWATWQNLISTKETDDYAEIIDEEDTYTMPSTRDYEIQRERIELGRCIGEGQFGDVHQGIYMSPENPALAVAIKTCKNCTSDSVREKFLQEALTMRQFDHPHIVKLIGVITENPVWIIMELCTLGELRSFLQVRKYSLDLASLILYAYQLSTALAYLESKRFVHRDIAARNVLVSSNDCVKLGDFGLSRYMEDSTYYKASKGKLPIKWMAPESINFRRFTSASDVWMFGVCMWEILMHGVKPFQGVKNNDVIGRIENGERLPMPPNCPPTLYSLMTKCWAYDPSRRPRFTELKAQLSTILEEEKAQQEERMRMESRRQATVSWDSGGSDEAPPKPSRPGYPSPRSSEGFYPSPQHMVQTNHYQVSGYPGSHGITAMAGSIYPGQASLLDQTDSWNHRPQEIAMWQPNVEDSTVLDLRGIGQVLPTHLMEERLIRQQQEMEEDQRWLEKEERFLKPDVRLSRGSIDREDGSLQGPIGNQHIYQPVGKPGKEEKNWAERNPAAPPKKPPRPGAPGHLGSLASLSSPADSYNEGVKPWRLQPQEISPPPTANLDRSNDKVYENVTGLVKAVIEMSSKIQPAPPEEYVPMVKEVGLALRTLLATVDETIPLLPASTHREIEMAQKLLNSDLGELINKMKLAQQYVMTSLQQEYKKQMLTAAHALAVDAKNLLDVIDQARLKMLGQTRPH

SEQ ID NO: 20735 - protein, 140 aa, Artificial Sequence
  Synthetic polypeptide
AGCSGSCLYSQHSGITLESRSLRPAWATWQNLISTKETDDYAEIIDEEDTYTMPSTRDYEIQRERIELGRCIGEGQFGDVHQGIYMSPENPALAVAIKTCKNCTSDSVREKFLQEASEVIFASKEIQFGSSIFDPVCLSA

SEQ ID NO: 20736 - protein, 95 aa, Artificial Sequence
  Synthetic polypeptide
AGCSGSCLYSQHSGITLESRSLRPAWATWQNLISTKETDDYAEIIDEEDTYTMPSTRDYEIQRERIELGRCIGEGQFGDVHQGIYMSPVCVCGRY

SEQ ID NO: 20737 - protein, 22 aa, Artificial Sequence
  Synthetic polypeptide
DQRGQHGKTSSLQKKQMIMLRL

SEQ ID NO: 20738 - protein, 21 aa, Artificial Sequence
  Synthetic polypeptide
VQEFETSVGNMAKPHLYKRNR

SEQ ID NO: 20739 - protein, 30 aa, Artificial Sequence
  Synthetic polypeptide
APDLDPNVSLMVHVGRLQGQNTKKTDPTNI

SEQ ID NO: 20740 - protein, 29 aa, Artificial Sequence
  Synthetic polypeptide
QQCCPLLSSRLRSKCLLDGSCWKTSRPKH

SEQ ID NO: 20741 - protein, 20 aa, Artificial Sequence
  Synthetic polypeptide
WFMLEDFKAKTLRKLIQQTF

SEQ ID NO: 20742 - protein, 298 aa, Artificial Sequence
  Synthetic polypeptide
WFMLEDFKAKTLRKLIQQTFRQFANLNREESILKFFEILSPVYRFDKECFKCALGSSWIISVELAIGPEEGISYLTDKGCNPTHLADFTQVQTIQYSNSEDKDRKGMLQLKIAGAPEPLTVTAPSLTIAENMADLIDGYCRLVNGTSQSFIIRPQKEGERALPSIPKLANSEKQGMRTHAVSVSETDDYAEIIDEEDTYTMPSTRDYEIQRERIELGRCIGEGQFGDVHQGIYMSPENPALAVAIKTCKNCTSDSVREKFLQEACHYTSLHWNWCRYISDPNVDAAQTPGMQSNNASV

SEQ ID NO: 20743 - protein, 798 aa, Artificial Sequence
  Synthetic polypeptide
WFMLEDFKAKTLRKLIQQTFRQFANLNREESILKFFEILSPVYRFDKECFKCALGSSWIISVELAIGPEEGISYLTDKGCNPTHLADFTQVQTIQYSNSEDKDRKGMLQLKIAGAPEPLTVTAPSLTIAENMADLIDGYCRLVNGTSQSFIIRPQKEGERALPSIPKLANSEKQGMRTHAVSVSETDDYAEIIDEEDTYTMPSTRDYEIQRERIELGRCIGEGQFGDVHQGIYMSPENPALAVAIKTCKNCTSDSVREKFLQEALTMRQFDHPHIVKLIGVITENPVWIIMELCTLGELRSFLQVRKYSLDLASLILYAYQLSTALAYLESKRFVHRDIAARNVLVSSNDCVKLGDFGLSRYMEDSTYYKASKGKLPIKWMAPESINFRRFTSASDVWMFGVCMWEILMHGVKPFQGVKNNDVIGRIENGERLPMPPNCPPTLYSLMTKCWAYDPSRRPRFTELKAQLSTILEEEKAQQEERMRMESRRQATVSWDSGGSDEAPPKPSRPGYPSPRSSEGFYPSPQHMVQTNHYQDSTVLDLRGIGQVLPTHLMEERLIRQQQEMEEDQRWLEKEERFLKPDVRLSRGSIDREDGSLQGPIGNQHIYQPVGKPDPAAPPKKPPRPGAPGHLGSLASLSSPADSYNEGVKLQPQEISPPPTANLDRSNDKVYENVTGLVKAVIEMSSKIQPAPPEEYVPMVKEVGLALRTLLATVDETIPLLPASTHREIEMAQKLLNSDLGELINKMKLAQQYVMTSLQQEYKKQMLTAAHALAVDAKNLLDVIDQARLKMLGQTRPH

SEQ ID NO: 20744 - protein, 844 aa, Artificial Sequence
  Synthetic polypeptide
WFMLEDFKAKTLRKLIQQTFRQFANLNREESILKFFEILSPVYRFDKECFKCALGSSWIISVELAIGPEEGISYLTDKGCNPTHLADFTQVQTIQYSNSEDKDRKGMLQLKIAGAPEPLTVTAPSLTIAENMADLIDGYCRLVNGTSQSFIIRPQKEGERALPSIPKLANSEKQGMRTHAVSVSETDDYAEIIDEEDTYTMPSTRDYEIQRERIELGRCIGEGQFGDVHQGIYMSPENPALAVAIKTCKNCTSDSVREKFLQEALTMRQFDHPHIVKLIGVITENPVWIIMELCTLGELRSFLQVRKYSLDLASLILYAYQLSTALAYLESKRFVHRDIAARNVLVSSNDCVKLGDFGLSRYMEDSTYYKASKGKLPIKWMAPESINFRRFTSASDVWMFGVCMWEILMHGVKPFQGVKNNDVIGRIENGERLPMPPNCPPTLYSLMTKCWAYDPSRRPRFTELKAQLSTILEEEKAQQEERMRMESRRQATVSWDSGGSDEAPPKPSRPGYPSPRSSEGFYPSPQHMVQTNHYQVSGYPGSHGITAMAGSIYPGQASLLDQTDSWNHRPQEIAMWQPNVEDSTVLDLRGIGQVLPTHLMEERLIRQQQEMEEDQRWLEKEERFLKPDVRLSRGSIDREDGSLQGPIGNQHIYQPVGKPDPAAPPKKPPRPGAPGHLGSLASLSSPADSYNEGVKLQPQEISPPPTANLDRSNDKVYENVTGLVKAVIEMSSKIQPAPPEEYVPMVKEVGLALRTLLATVDETIPLLPASTHREIEMAQKLLNSDLGELINKMKLAQQYVMTSLQQEYKKQMLTAAHALAVDAKNLLDVIDQARLKMLGQTRPH

SEQ ID NO: 20745 - protein, 857 aa, Artificial Sequence
  Synthetic polypeptide
WFMLEDFKAKTLRKLIQQTFRQFANLNREESILKFFEILSPVYRFDKECFKCALGSSWIISVELAIGPEEGISYLTDKGCNPTHLADFTQVQTIQYSNSEDKDRKGMLQLKIAGAPEPLTVTAPSLTIAENMADLIDGYCRLVNGTSQSFIIRPQKEGERALPSIPKLANSEKQGMRTHAVSVSETDDYAEIIDEEDTYTMPSTRDYEIQRERIELGRCIGEGQFGDVHQGIYMSPENPALAVAIKTCKNCTSDSVREKFLQEALTMRQFDHPHIVKLIGVITENPVWIIMELCTLGELRSFLQVRKYSLDLASLILYAYQLSTALAYLESKRFVHRDIAARNVLVSSNDCVKLGDFGLSRYMEDSTYYKASKGKLPIKWMAPESINFRRFTSASDVWMFGVCMWEILMHGVKPFQGVKNNDVIGRIENGERLPMPPNCPPTLYSLMTKCWAYDPSRRPRFTELKAQLSTILEEEKAQQEERMRMESRRQATVSWDSGGSDEAPPKPSRPGYPSPRSSEGFYPSPQHMVQTNHYQVSGYPGSHGITAMAGSIYPGQASLLDQTDSWNHRPQEIAMWQPNVEDSTVLDLRGIGQVLPTHLMEERLIRQQQEMEEDQRWLEKEERFLKPDVRLSRGSIDREDGSLQGPIGNQHIYQPVGKPGKEEKNWAERNPAAPPKKPPRPGAPGHLGSLASLSSPADSYNEGVKPNQLQPQEISPPPTANLDRSNDKVYENVTGLVKAVIEMSSKIQPAPPEEYVPMVKEVGLALRTLLATVDETIPLLPASTHREIEMAQKLLNSDLGELINKMKLAQQYVMTSLQQEYKKQMLTAAHALAVDAKNLLDVIDQARLKMLGQTRPH

SEQ ID NO: 20746 - protein, 857 aa, Artificial Sequence
  Synthetic polypeptide
WFMLEDFKAKTLRKLIQQTFRQFANLNREESILKFFEILSPVYRFDKECFKCALGSSWIISVELAIGPEEGISYLTDKGCNPTHLADFTQVQTIQYSNSEDKDRKGMLQLKIAGAPEPLTVTAPSLTIAENMADLIDGYCRLVNGTSQSFIIRPQKEGERALPSIPKLANSEKQGMRTHAVSVSETDDYAEIIDEEDTYTMPSTRDYEIQRERIELGRCIGEGQFGDVHQGIYMSPENPALAVAIKTCKNCTSDSVREKFLQEALTMRQFDHPHIVKLIGVITENPVWIIMELCTLGELRSFLQVRKYSLDLASLILYAYQLSTALAYLESKRFVHRDIAARNVLVSSNDCVKLGDFGLSRYMEDSTYYKASKGKLPIKWMAPESINFRRFTSASDVWMFGVCMWEILMHGVKPFQGVKNNDVIGRIENGERLPMPPNCPPTLYSLMTKCWAYDPSRRPRFTELKAQLSTILEEEKAQQEERMRMESRRQATVSWDSGGSDEAPPKPSRPGYPSPRSSEGFYPSPQHMVQTNHYQVSGYPGSHGITAMAGSIYPGQASLLDQTDSWNHRPQEIAMWQPNVEDSTVLDLRGIGQVLPTHLMEERLIRQQQEMEEDQRWLEKEERFLKPDVRLSRGSIDREDGSLQGPIGNQHIYQPVGKPGKEEKNWAERNPAAPPKKPPRPGAPGHLGSLASLSSPADSYNEGVKPWRLQPQEISPPPTANLDRSNDKVYENVTGLVKAVIEMSSKIQPAPPEEYVPMVKEVGLALRTLLATVDETIPLLPASTHREIEMAQKLLNSDLGELINKMKLAQQYVMTSLQQEYKKQMLTAAHALAVDAKNLLDVIDQARLKMLGQTRPH

SEQ ID NO: 20747 - protein, 21 aa, Artificial Sequence
  Synthetic polypeptide
GQEFETSLANMKRCWFKAIFS

SEQ ID NO: 20748 - protein, 29 aa, Artificial Sequence
  Synthetic polypeptide
SQRFGRLKRADHLRSGVRDQPGQHEKMLV

SEQ ID NO: 20749 - protein, 12 aa, Artificial Sequence
  Synthetic polypeptide
LQKRCWFKAIFS

SEQ ID NO: 20750 - protein, 63 aa, Artificial Sequence
  Synthetic polypeptide
PVLLKTVKVMKETVEVRETHISRSCLKKQDDYRKDVGLKRFFPKSLLDSVKAKTLRKLIQQTF

SEQ ID NO: 20751 - protein, 341 aa, Artificial Sequence
  Synthetic polypeptide
PVLLKTVKVMKETVEVRETHISRSCLKKQDDYRKDVGLKRFFPKSLLDSVKAKTLRKLIQQTFRQFANLNREESILKFFEILSPVYRFDKECFKCALGSSWIISVELAIGPEEGISYLTDKGCNPTHLADFTQVQTIQYSNSEDKDRKGMLQLKIAGAPEPLTVTAPSLTIAENMADLIDGYCRLVNGTSQSFIIRPQKEGERALPSIPKLANSEKQGMRTHAVSVSETDDYAEIIDEEDTYTMPSTRDYEIQRERIELGRCIGEGQFGDVHQGIYMSPENPALAVAIKTCKNCTSDSVREKFLQEACHYTSLHWNWCRYISDPNVDAAQTPGMQSNNASV

SEQ ID NO: 20752 - protein, 841 aa, Artificial Sequence
  Synthetic polypeptide
PVLLKTVKVMKETVEVRETHISRSCLKKQDDYRKDVGLKRFFPKSLLDSVKAKTLRKLIQQTFRQFANLNREESILKFFEILSPVYRFDKECFKCALGSSWIISVELAIGPEEGISYLTDKGCNPTHLADFTQVQTIQYSNSEDKDRKGMLQLKIAGAPEPLTVTAPSLTIAENMADLIDGYCRLVNGTSQSFIIRPQKEGERALPSIPKLANSEKQGMRTHAVSVSETDDYAEIIDEEDTYTMPSTRDYEIQRERIELGRCIGEGQFGDVHQGIYMSPENPALAVAIKTCKNCTSDSVREKFLQEALTMRQFDHPHIVKLIGVITENPVWIIMELCTLGELRSFLQVRKYSLDLASLILYAYQLSTALAYLESKRFVHRDIAARNVLVSSNDCVKLGDFGLSRYMEDSTYYKASKGKLPIKWMAPESINFRRFTSASDVWMFGVCMWEILMHGVKPFQGVKNNDVIGRIENGERLPMPPNCPPTLYSLMTKCWAYDPSRRPRFTELKAQLSTILEEEKAQQEERMRMESRRQATVSWDSGGSDEAPPKPSRPGYPSPRSSEGFYPSPQHMVQTNHYQDSTVLDLRGIGQVLPTHLMEERLIRQQQEMEEDQRWLEKEERFLKPDVRLSRGSIDREDGSLQGPIGNQHIYQPVGKPDPAAPPKKPPRPGAPGHLGSLASLSSPADSYNEGVKLQPQEISPPPTANLDRSNDKVYENVTGLVKAVIEMSSKIQPAPPEEYVPMVKEVGLALRTLLATVDETIPLLPASTHREIEMAQKLLNSDLGELINKMKLAQQYVMTSLQQEYKKQMLTAAHALAVDAKNLLDVIDQARLKMLGQTRPH

SEQ ID NO: 20753 - protein, 887 aa, Artificial Sequence
  Synthetic polypeptide
PVLLKTVKVMKETVEVRETHISRSCLKKQDDYRKDVGLKRFFPKSLLDSVKAKTLRKLIQQTFRQFANLNREESILKFFEILSPVYRFDKECFKCALGSSWIISVELAIGPEEGISYLTDKGCNPTHLADFTQVQTIQYSNSEDKDRKGMLQLKIAGAPEPLTVTAPSLTIAENMADLIDGYCRLVNGTSQSFIIRPQKEGERALPSIPKLANSEKQGMRTHAVSVSETDDYAEIIDEEDTYTMPSTRDYEIQRERIELGRCIGEGQFGDVHQGIYMSPENPALAVAIKTCKNCTSDSVREKFLQEALTMRQFDHPHIVKLIGVITENPVWIIMELCTLGELRSFLQVRKYSLDLASLILYAYQLSTALAYLESKRFVHRDIAARNVLVSSNDCVKLGDFGLSRYMEDSTYYKASKGKLPIKWMAPESINFRRFTSASDVWMFGVCMWEILMHGVKPFQGVKNNDVIGRIENGERLPMPPNCPPTLYSLMTKCWAYDPSRRPRFTELKAQLSTILEEEKAQQEERMRMESRRQATVSWDSGGSDEAPPKPSRPGYPSPRSSEGFYPSPQHMVQTNHYQVSGYPGSHGITAMAGSIYPGQASLLDQTDSWNHRPQEIAMWQPNVEDSTVLDLRGIGQVLPTHLMEERLIRQQQEMEEDQRWLEKEERFLKPDVRLSRGSIDREDGSLQGPIGNQHIYQPVGKPDPAAPPKKPPRPGAPGHLGSLASLSSPADSYNEGVKLQPQEISPPPTANLDRSNDKVYENVTGLVKAVIEMSSKIQPAPPEEYVPMVKEVGLALRTLLATVDETIPLLPASTHREIEMAQKLLNSDLGELINKMKLAQQYVMTSLQQEYKKQMLTAAHALAVDAKNLLDVIDQARLKMLGQTRPH

SEQ ID NO: 20754 - protein, 900 aa, Artificial Sequence
  Synthetic polypeptide
PVLLKTVKVMKETVEVRETHISRSCLKKQDDYRKDVGLKRFFPKSLLDSVKAKTLRKLIQQTFRQFANLNREESILKFFEILSPVYRFDKECFKCALGSSWIISVELAIGPEEGISYLTDKGCNPTHLADFTQVQTIQYSNSEDKDRKGMLQLKIAGAPEPLTVTAPSLTIAENMADLIDGYCRLVNGTSQSFIIRPQKEGERALPSIPKLANSEKQGMRTHAVSVSETDDYAEIIDEEDTYTMPSTRDYEIQRERIELGRCIGEGQFGDVHQGIYMSPENPALAVAIKTCKNCTSDSVREKFLQEALTMRQFDHPHIVKLIGVITENPVWIIMELCTLGELRSFLQVRKYSLDLASLILYAYQLSTALAYLESKRFVHRDIAARNVLVSSNDCVKLGDFGLSRYMEDSTYYKASKGKLPIKWMAPESINFRRFTSASDVWMFGVCMWEILMHGVKPFQGVKNNDVIGRIENGERLPMPPNCPPTLYSLMTKCWAYDPSRRPRFTELKAQLSTILEEEKAQQEERMRMESRRQATVSWDSGGSDEAPPKPSRPGYPSPRSSEGFYPSPQHMVQTNHYQVSGYPGSHGITAMAGSIYPGQASLLDQTDSWNHRPQEIAMWQPNVEDSTVLDLRGIGQVLPTHLMEERLIRQQQEMEEDQRWLEKEERFLKPDVRLSRGSIDREDGSLQGPIGNQHIYQPVGKPGKEEKNWAERNPAAPPKKPPRPGAPGHLGSLASLSSPADSYNEGVKPNQLQPQEISPPPTANLDRSNDKVYENVTGLVKAVIEMSSKIQPAPPEEYVPMVKEVGLALRTLLATVDETIPLLPASTHREIEMAQKLLNSDLGELINKMKLAQQYVMTSLQQEYKKQMLTAAHALAVDAKNLLDVIDQARLKMLGQTRPH

SEQ ID NO: 20755 - protein, 900 aa, Artificial Sequence
  Synthetic polypeptide
PVLLKTVKVMKETVEVRETHISRSCLKKQDDYRKDVGLKRFFPKSLLDSVKAKTLRKLIQQTFRQFANLNREESILKFFEILSPVYRFDKECFKCALGSSWIISVELAIGPEEGISYLTDKGCNPTHLADFTQVQTIQYSNSEDKDRKGMLQLKIAGAPEPLTVTAPSLTIAENMADLIDGYCRLVNGTSQSFIIRPQKEGERALPSIPKLANSEKQGMRTHAVSVSETDDYAEIIDEEDTYTMPSTRDYEIQRERIELGRCIGEGQFGDVHQGIYMSPENPALAVAIKTCKNCTSDSVREKFLQEALTMRQFDHPHIVKLIGVITENPVWIIMELCTLGELRSFLQVRKYSLDLASLILYAYQLSTALAYLESKRFVHRDIAARNVLVSSNDCVKLGDFGLSRYMEDSTYYKASKGKLPIKWMAPESINFRRFTSASDVWMFGVCMWEILMHGVKPFQGVKNNDVIGRIENGERLPMPPNCPPTLYSLMTKCWAYDPSRRPRFTELKAQLSTILEEEKAQQEERMRMESRRQATVSWDSGGSDEAPPKPSRPGYPSPRSSEGFYPSPQHMVQTNHYQVSGYPGSHGITAMAGSIYPGQASLLDQTDSWNHRPQEIAMWQPNVEDSTVLDLRGIGQVLPTHLMEERLIRQQQEMEEDQRWLEKEERFLKPDVRLSRGSIDREDGSLQGPIGNQHIYQPVGKPGKEEKNWAERNPAAPPKKPPRPGAPGHLGSLASLSSPADSYNEGVKPWRLQPQEISPPPTANLDRSNDKVYENVTGLVKAVIEMSSKIQPAPPEEYVPMVKEVGLALRTLLATVDETIPLLPASTHREIEMAQKLLNSDLGELINKMKLAQQYVMTSLQQEYKKQMLTAAHALAVDAKNLLDVIDQARLKMLGQTRPH

SEQ ID NO: 20756 - protein, 11 aa, Artificial Sequence
  Synthetic polypeptide
RNRMITEKMLV

SEQ ID NO: 20757 - protein, 15 aa, Artificial Sequence
  Synthetic polypeptide
QIFFCHLQTSKFIDM

SEQ ID NO: 20758 - protein, 16 aa, Artificial Sequence
  Synthetic polypeptide
QIFFCHLQTSKFIDMN

SEQ ID NO: 20759 - protein, 4 aa, Artificial Sequence
  Synthetic polypeptide
VHRY

SEQ ID NO: 20760 - protein, 38 aa, Artificial Sequence
  Synthetic polypeptide
VHRYELRIRYLPKGFLNQFTEDKPTLNFFYQQVKSDYM

SEQ ID NO: 20761 - protein, 42 aa, Artificial Sequence
  Synthetic polypeptide
VHRYELRIRYLPKGFLNQFTEDKPTLNFFYQQVKSDYMLEIA

SEQ ID NO: 20762 - protein, 888 aa, Artificial Sequence
  Synthetic polypeptide
VHRYELRIRYLPKGFLNQFTEDKPTLNFFYQQVKSDYMLEIADQVDQEIALKLGCLEIRRSYWEMRGNALEKKSNYEVLEKDVGLKRFFPKSLLDSVKAKTLRKLIQQTFRQFANLNREESILKFFEILSPVYRFDKECFKCALGSSWIISVELAIGPEEGISYLTDKGCNPTHLADFTQVQTIQYSNSEDKDRKGMLQLKIAGAPEPLTVTAPSLTIAENMADLIDGYCRLVNGTSQSFIIRPQKEGERALPSIPKLANSEKQGMRTHAVSVSETDDYAEIIDEEDTYTMPSTRDYEIQRERIELGRCIGEGQFGDVHQGIYMSPENPALAVAIKTCKNCTSDSVREKFLQEALTMRQFDHPHIVKLIGVITENPVWIIMELCTLGELRSFLQVRKYSLDLASLILYAYQLSTALAYLESKRFVHRDIAARNVLVSSNDCVKLGDFGLSRYMEDSTYYKASKGKLPIKWMAPESINFRRFTSASDVWMFGVCMWEILMHGVKPFQGVKNNDVIGRIENGERLPMPPNCPPTLYSLMTKCWAYDPSRRPRFTELKAQLSTILEEEKAQQEERMRMESRRQATVSWDSGGSDEAPPKPSRPGYPSPRSSEGFYPSPQHMVQTNHYQDSTVLDLRGIGQVLPTHLMEERLIRQQQEMEEDQRWLEKEERFLKPDVRLSRGSIDREDGSLQGPIGNQHIYQPVGKPDPAAPPKKPPRPGAPGHLGSLASLSSPADSYNEGVKLQPQEISPPPTANLDRSNDKVYENVTGLVKAVIEMSSKIQPAPPEEYVPMVKEVGLALRTLLATVDETIPLLPASTHREIEMAQKLLNSDLGELINKMKLAQQYVMTSLQQEYKKQMLTAAHALAVDAKNLLDVIDQARLKMLGQTRPH

SEQ ID NO: 20763 - protein, 934 aa, Artificial Sequence
  Synthetic polypeptide
VHRYELRIRYLPKGFLNQFTEDKPTLNFFYQQVKSDYMLEIADQVDQEIALKLGCLEIRRSYWEMRGNALEKKSNYEVLEKDVGLKRFFPKSLLDSVKAKTLRKLIQQTFRQFANLNREESILKFFEILSPVYRFDKECFKCALGSSWIISVELAIGPEEGISYLTDKGCNPTHLADFTQVQTIQYSNSEDKDRKGMLQLKIAGAPEPLTVTAPSLTIAENMADLIDGYCRLVNGTSQSFIIRPQKEGERALPSIPKLANSEKQGMRTHAVSVSETDDYAEIIDEEDTYTMPSTRDYEIQRERIELGRCIGEGQFGDVHQGIYMSPENPALAVAIKTCKNCTSDSVREKFLQEALTMRQFDHPHIVKLIGVITENPVWIIMELCTLGELRSFLQVRKYSLDLASLILYAYQLSTALAYLESKRFVHRDIAARNVLVSSNDCVKLGDFGLSRYMEDSTYYKASKGKLPIKWMAPESINFRRFTSASDVWMFGVCMWEILMHGVKPFQGVKNNDVIGRIENGERLPMPPNCPPTLYSLMTKCWAYDPSRRPRFTELKAQLSTILEEEKAQQEERMRMESRRQATVSWDSGGSDEAPPKPSRPGYPSPRSSEGFYPSPQHMVQTNHYQVSGYPGSHGITAMAGSIYPGQASLLDQTDSWNHRPQEIAMWQPNVEDSTVLDLRGIGQVLPTHLMEERLIRQQQEMEEDQRWLEKEERFLKPDVRLSRGSIDREDGSLQGPIGNQHIYQPVGKPDPAAPPKKPPRPGAPGHLGSLASLSSPADSYNEGVKLQPQEISPPPTANLDRSNDKVYENVTGLVKAVIEMSSKIQPAPPEEYVPMVKEVGLALRTLLATVDETIPLLPASTHREIEMAQKLLNSDLGELINKMKLAQQYVMTSLQQEYKKQMLTAAHALAVDAKNLLDVIDQARLKMLGQTRPH

SEQ ID NO: 20764 - protein, 947 aa, Artificial Sequence
  Synthetic polypeptide
VHRYELRIRYLPKGFLNQFTEDKPTLNFFYQQVKSDYMLEIADQVDQEIALKLGCLEIRRSYWEMRGNALEKKSNYEVLEKDVGLKRFFPKSLLDSVKAKTLRKLIQQTFRQFANLNREESILKFFEILSPVYRFDKECFKCALGSSWIISVELAIGPEEGISYLTDKGCNPTHLADFTQVQTIQYSNSEDKDRKGMLQLKIAGAPEPLTVTAPSLTIAENMADLIDGYCRLVNGTSQSFIIRPQKEGERALPSIPKLANSEKQGMRTHAVSVSETDDYAEIIDEEDTYTMPSTRDYEIQRERIELGRCIGEGQFGDVHQGIYMSPENPALAVAIKTCKNCTSDSVREKFLQEALTMRQFDHPHIVKLIGVITENPVWIIMELCTLGELRSFLQVRKYSLDLASLILYAYQLSTALAYLESKRFVHRDIAARNVLVSSNDCVKLGDFGLSRYMEDSTYYKASKGKLPIKWMAPESINFRRFTSASDVWMFGVCMWEILMHGVKPFQGVKNNDVIGRIENGERLPMPPNCPPTLYSLMTKCWAYDPSRRPRFTELKAQLSTILEEEKAQQEERMRMESRRQATVSWDSGGSDEAPPKPSRPGYPSPRSSEGFYPSPQHMVQTNHYQVSGYPGSHGITAMAGSIYPGQASLLDQTDSWNHRPQEIAMWQPNVEDSTVLDLRGIGQVLPTHLMEERLIRQQQEMEEDQRWLEKEERFLKPDVRLSRGSIDREDGSLQGPIGNQHIYQPVGKPGKEEKNWAERNPAAPPKKPPRPGAPGHLGSLASLSSPADSYNEGVKPNQLQPQEISPPPTANLDRSNDKVYENVTGLVKAVIEMSSKIQPAPPEEYVPMVKEVGLALRTLLATVDETIPLLPASTHREIEMAQKLLNSDLGELINKMKLAQQYVMTSLQQEYKKQMLTAAHALAVDAKNLLDVIDQARLKMLGQTRPH

SEQ ID NO: 20765 - protein, 947 aa, Artificial Sequence
  Synthetic polypeptide
VHRYELRIRYLPKGFLNQFTEDKPTLNFFYQQVKSDYMLEIADQVDQEIALKLGCLEIRRSYWEMRGNALEKKSNYEVLEKDVGLKRFFPKSLLDSVKAKTLRKLIQQTFRQFANLNREESILKFFEILSPVYRFDKECFKCALGSSWIISVELAIGPEEGISYLTDKGCNPTHLADFTQVQTIQYSNSEDKDRKGMLQLKIAGAPEPLTVTAPSLTIAENMADLIDGYCRLVNGTSQSFIIRPQKEGERALPSIPKLANSEKQGMRTHAVSVSETDDYAEIIDEEDTYTMPSTRDYEIQRERIELGRCIGEGQFGDVHQGIYMSPENPALAVAIKTCKNCTSDSVREKFLQEALTMRQFDHPHIVKLIGVITENPVWIIMELCTLGELRSFLQVRKYSLDLASLILYAYQLSTALAYLESKRFVHRDIAARNVLVSSNDCVKLGDFGLSRYMEDSTYYKASKGKLPIKWMAPESINFRRFTSASDVWMFGVCMWEILMHGVKPFQGVKNNDVIGRIENGERLPMPPNCPPTLYSLMTKCWAYDPSRRPRFTELKAQLSTILEEEKAQQEERMRMESRRQATVSWDSGGSDEAPPKPSRPGYPSPRSSEGFYPSPQHMVQTNHYQVSGYPGSHGITAMAGSIYPGQASLLDQTDSWNHRPQEIAMWQPNVEDSTVLDLRGIGQVLPTHLMEERLIRQQQEMEEDQRWLEKEERFLKPDVRLSRGSIDREDGSLQGPIGNQHIYQPVGKPGKEEKNWAERNPAAPPKKPPRPGAPGHLGSLASLSSPADSYNEGVKPWRLQPQEISPPPTANLDRSNDKVYENVTGLVKAVIEMSSKIQPAPPEEYVPMVKEVGLALRTLLATVDETIPLLPASTHREIEMAQKLLNSDLGELINKMKLAQQYVMTSLQQEYKKQMLTAAHALAVDAKNLLDVIDQARLKMLGQTRPH

SEQ ID NO: 20766 - protein, 49 aa, Artificial Sequence
  Synthetic polypeptide
ERRGRKEEGRGRGHCPAVLLLQSPGEQRGLPAGGELHPAGGAVLDRAHP

SEQ ID NO: 20767 - protein, 67 aa, Artificial Sequence
  Synthetic polypeptide
ERRGRKEEGRGRGHCPAVLLLQSPGEQRGLPAGGELHPAGGAVLDRAHPRSWPPDRHQQRLQLELRG

SEQ ID NO: 20768 - protein, 25 aa, Artificial Sequence
  Synthetic polypeptide
GEEGKEGGRERKGALPCCATPAKPR

SEQ ID NO: 20769 - protein, 118 aa, Artificial Sequence
  Synthetic polypeptide
RGGEGRRKGEEGGTALLCYSCKAQVSNEDCLQVENCTQLGEQCWTARIRAVGLLTVISKGCSLNCVDDSQDYYVGKKNITCCDTDLCNASGAHALQPAAAILALLPALGLLLWGPGQL

SEQ ID NO: 20770 - protein, 58 aa, Artificial Sequence
  Synthetic polypeptide
RGGEGRRKGEEGGTALLCYSCKAQVSNEDCLQVENCTQLGEQCWTARIREWGDDSRQA

SEQ ID NO: 20771 - protein, 42 aa, Artificial Sequence
  Synthetic polypeptide
NPGSLENHLAAAPARRTAPRESRRARRATLGAPTVTEHGVGL

SEQ ID NO: 20772 - protein, 65 aa, Artificial Sequence
  Synthetic polypeptide
PLQHTGLRPTRAETLSCLLLEPRIAGKSPSSSSCSPDGSQGEQTRQTRHPRGADGHGAWGRPLSG

SEQ ID NO: 20773 - protein, 512 aa, Artificial Sequence
  Synthetic polypeptide
QQLLLAGRLPGRADAPDAPPSGRRRSRSMGSAFERVVRRVVQELDHGGEFIPVTSLQSSTGFQPYCLVVRKPSSSWFWKPRYKCVNLSIKDILEPDAAEPDVQRGRSFHFYDAMDGQIQGSVELAAPGQAKIAGGAAVSDSSSTSMNVYSLSVDPNTWQTLLHERHLRQPEHKVLQQLRSRGDNVYVVTEVLQTQKEVEVTRTHKREGSGRFSLPGATCLQGEGQGHLSQKKTVTIPSGSTLAFRVAQLVIDSDLDVLLFPDKKQRTFQPPATGHKRSTSEGAWPQLPSGLSMMRCLHNFLTDGVPAEGAFTEDFQGLRAEVETISKELELLDRELCQLLLEGLEGVLRDQLALRALEEALEQGQSLGPVEPLDGPAGAVLECLVLSSGMLVPELAIPVVYLLGALTMLSETQHKLLAEALESQTLLGPLELVGSLLEQSAPWQERSTMSLPPGLLGNSWGEGAPAWVLLDECGLELGEDTPHVCWEPQAQGRMCALYASLALLSGLSQEPH

SEQ ID NO: 20774 - protein, 21 aa, Artificial Sequence
  Synthetic polypeptide
TVTTGQVLFESRYMSHCFNHL

SEQ ID NO: 20775 - protein, 14 aa, Artificial Sequence
  Synthetic polypeptide
VQVYESLLQPPVRN

SEQ ID NO: 20776 - protein, 302 aa, Artificial Sequence
  Synthetic polypeptide
VTASTTCEKLEKARNELQTVYEAFVQQHQAEKTERENRLKEFYTREYEKLRDTYIEEAEKYKMQLQEQFDNLNAAHETSKLEIEASHSEKLELLKKAYEASLSEIKKGHEIEKKSLEDLLSEKQESLEKQINDLKSENDALNEKLKSEEQKRRAREKANLKNPQIMYLEQELESLKAVLEIKNEKLHQQDIKLMKMEKLVDNNTALVDKLKRFQQENEELKARMDKHMAISRQLSTEQAVLQESLEKESKVNKRLSMENEELLWKLHNGDLCSPKRSPTSSAIPLQSPRNSGSFPSPSISPR

SEQ ID NO: 20777 - protein, 315 aa, Artificial Sequence
  Synthetic polypeptide
NKQSQQDKYYLSPVTASTTCEKLEKARNELQTVYEAFVQQHQAEKTERENRLKEFYTREYEKLRDTYIEEAEKYKMQLQEQFDNLNAAHETSKLEIEASHSEKLELLKKAYEASLSEIKKGHEIEKKSLEDLLSEKQESLEKQINDLKSENDALNEKLKSEEQKRRAREKANLKNPQIMYLEQELESLKAVLEIKNEKLHQQDIKLMKMEKLVDNNTALVDKLKRFQQENEELKARMDKHMAISRQLSTEQAVLQESLEKESKVNKRLSMENEELLWKLHNGDLCSPKRSPTSSAIPLQSPRNSGSFPSPSISPR

SEQ ID NO: 20778 - protein, 18 aa, Artificial Sequence
  Synthetic polypeptide
TVTTGQVLFESSHCFNHL

SEQ ID NO: 20779 - protein, 11 aa, Artificial Sequence
  Synthetic polypeptide
VQSLLQPPVRN

SEQ ID NO: 20780 - protein, 27 aa, Artificial Sequence
  Synthetic polypeptide
FQQCFHKRIKPYYPEASMSLLQPPVRN

SEQ ID NO: 20781 - protein, 24 aa, Artificial Sequence
  Synthetic polypeptide
FSSASTRELSPTTLRHPCHCFNHL

SEQ ID NO: 20782 - protein, 305 aa, Artificial Sequence
  Synthetic polypeptide
GIHVTASTTCEKLEKARNELQTVYEAFVQQHQAEKTERENRLKEFYTREYEKLRDTYIEEAEKYKMQLQEQFDNLNAAHETSKLEIEASHSEKLELLKKAYEASLSEIKKGHEIEKKSLEDLLSEKQESLEKQINDLKSENDALNEKLKSEEQKRRAREKANLKNPQIMYLEQELESLKAVLEIKNEKLHQQDIKLMKMEKLVDNNTALVDKLKRFQQENEELKARMDKHMAISRQLSTEQAVLQESLEKESKVNKRLSMENEELLWKLHNGDLCSPKRSPTSSAIPLQSPRNSGSFPSPSISPR

SEQ ID NO: 20783 - protein, 62 aa, Artificial Sequence
  Synthetic polypeptide
GNRRGLASEAWVLTLNLDSHRSCLHPGKTFTPLKRAGKRILEAYVSSHRQLPMRCPLRKHLN

SEQ ID NO: 20784 - protein, 17 aa, Artificial Sequence
  Synthetic polypeptide
IWIPIEVVYIQGRHSHL

SEQ ID NO: 20785 - protein, 407 aa, Artificial Sequence
  Synthetic polypeptide
KLSTSREDIHTFEKSRQKNPRSLCIQPQTAPDALPPEKTLELTQYKTKCENQSGFILQLKQLLACGNTKFEALTVVIQHLLSEREEALKQHKTLSQELVNLRGELVTASTTCEKLEKARNELQTVYEAFVQQHQAEKTERENRLKEFYTREYEKLRDTYIEEAEKYKMQLQEQFDNLNAAHETSKLEIEASHSEKLELLKKAYEASLSEIKKGHEIEKKSLEDLLSEKQESLEKQINDLKSENDALNEKLKSEEQKRRAREKANLKNPQIMYLEQELESLKAVLEIKNEKLHQQDIKLMKMEKLVDNNTALVDKLKRFQQENEELKARMDKHMAISRQLSTEQAVLQESLEKESKVNKRLSMENEELLWKLHNGDLCSPKRSPTSSAIPLQSPRNSGSFPSPSISPR

SEQ ID NO: 20786 - protein, 32 aa, Artificial Sequence
  Synthetic polypeptide
IKLKRAGKRILEAYVSSHRQLPMRCPLRKHLN

SEQ ID NO: 20787 - protein, 3 aa, Artificial Sequence
  Synthetic polypeptide
KLS

SEQ ID NO: 20788 - protein, 396 aa, Artificial Sequence
  Synthetic polypeptide
VEKSRQKNPRSLCIQPQTAPDALPPEKTLELTQYKTKCENQSGFILQLKQLLACGNTKFEALTVVIQHLLSEREEALKQHKTLSQELVNLRGELVTASTTCEKLEKARNELQTVYEAFVQQHQAEKTERENRLKEFYTREYEKLRDTYIEEAEKYKMQLQEQFDNLNAAHETSKLEIEASHSEKLELLKKAYEASLSEIKKGHEIEKKSLEDLLSEKQESLEKQINDLKSENDALNEKLKSEEQKRRAREKANLKNPQIMYLEQELESLKAVLEIKNEKLHQQDIKLMKMEKLVDNNTALVDKLKRFQQENEELKARMDKHMAISRQLSTEQAVLQESLEKESKVNKRLSMENEELLWKLHNGDLCSPKRSPTSSAIPLQSPRNSGSFPSPSISPR

SEQ ID NO: 20789 - protein, 38 aa, Artificial Sequence
  Synthetic polypeptide
KIVRKCRFAGPTDLRHQKLWDGPQQYVFYLVLQRHLFG

SEQ ID NO: 20790 - protein, 62 aa, Artificial Sequence
  Synthetic polypeptide
KMQIRRPHRPTASETLGWTPAVRVLLGAAETFVWVNNASAHSQSVAKAKYEFLFGRSEGKAP

SEQ ID NO: 20791 - protein, 1068 aa, Artificial Sequence
  Synthetic polypeptide
KMQIRRPHRPTASETLGWTPAVRVLLGAAETFVWVNNASAHSQSVAKAKYEFLFGRSEGKAPDTSDHGGSTLLPPNVTNEFPEYGTMEEGGEGLRASLEFDGEALPCHPQEQQGVQPLTGCHSGLDSVTEGPKDVREAPSQSHLKEQSLQPIDSLISALKATEARIISGTLQATKVLDQDAVSSFSVQQVEKELDTASRKTQRVNKTLPAGQKNLPEIPLSAEVTTEESFYLSIQKDLTALLTGDTQAEISQIMNNGRKGAVCVQEPSCPLASLGSSAVTCHSAGSVGFLKEQRSALGREHPGGCDRSSSMGRPGRVKHVEFQGVEILWTGGDKRETQHPIDFETSLQRTASPDSKESSKVPRHLISSAGLCNSSSLTENVWDESWKAPSERPGTSSGTFSPVRLDESGEDEVFLQENKQHLEKTPKPERDRERISEQEEHVKGEDEDILGPGYTEDSTDVYSSQFETILDNTSLYYSAESLETLYSEPDSYFSFEMPLTPMIQQRIKEGGQFLERTSGGGHQDILSVSADGGIVMGYSSGVTNGLNDASDSIYTKGTPEIAFWGSNAGVKTTRLEAHSEMGSTEILEKETPENLSNGTSSNVEAAKRLAKRLYQLDRFKRSDVAKHLGKNNEFSKLVAEEYLKFFDFTGMTLDQSLRYFFKAFSLVGETQERERVLIHFSNRYFYCNPDTIASQDGVHCLTCAIMLLNTDLHGHNIGKKMTCQEFIANLQGVNEGVDFSKDLLKALYNSIKNEKLEWAVDDEEKKKSPSESTEEKANGTHPKTISRIGSTTNPFLDIPHDPNAAVYKSGFLARKIHADMDGKKTPRGKRGWKTFYAVLKGTVLYLQKDEYKPEKALSEEDLKNAVSVHHALASKATDYEKKPNVFKLKTADWRVLLFQTQSPEEMQGWINKINCVAAVFSAPPFPAAIGSQKKFSRPLLPATTTKLSQEEQLKSHESKLKQITTELAEHRSYPPDKKVKAKDVDEYKLKDHYLEFEKTRYEMYVSILKEGGKELLSNDESEAAGLKKSHSSPSLNPDTSPITAKVKRNVSERKDHRPETPSIKQKVT

SEQ ID NO: 20792 - protein, 1070 aa, Artificial Sequence
  Synthetic polypeptide
KMQIRRPHRPTASETLGWTPAVRVLLGAAETFVWVNNASAHSQSVAKAKYEFLFGRSEGKAPDTSDHGGSTLLPPNVTNEFPEYGTMEEGGEGLRASLEFDGEALPCHPQEQQGVQPLTGCHSGLDSVTEGPKDVREAPSQSHLKEQSLQPIDSLISALKATEARIISGTLQATKVLDQDAVSSFSVQQVEKELDTASRKTQRVNKTLPAGQKNLPEIPLSAEVTTEESFYLSIQKDLTALLTGDTQAEISQIMNNGRKGAVCVQEPSCPLASLGSSAVTCHSAGSVGFLKEQRSALGREHPGGCDRSSSMGRPGRVKHVEFQGVEILWTGGDKRETQHPIDFETSLQRTASPDSKESSKVPRHLISSAGLCNSSSLTENVWDESWKAPSERPGTSSGTFSPVRLDESGEDEVFLQENKQHLEKTPKPERDRERISEQEEHVKGEDEDILGPGYTEDSTDVYSSQFETILDNTSLYYSAESLETLYSEPDSYFSFEMPLTPMIQQRIKEGGQFLERTSGGGHQDILSVSADGGIVMGYSSGVTNGLNDASDSIYTKGTPEIAFWGSNAGVKTTRLEAHSEMGSTEILEKETPENLSNGTSSNVEAAKRLAKRLYQLDRFKRSDVAKHLGKNNEFSKLVAEEYLKFFDFTGMTLDQSLRYFFKAFSLVGETQERERVLIHFSNRYFYCNPDTIASQDGVHCLTCAIMLLNTDLHGHVSNIGKKMTCQEFIANLQGVNEGVDFSKDLLKALYNSIKNEKLEWAVDDEEKKKSPSESTEEKANGTHPKTISRIGSTTNPFLDIPHDPNAAVYKSGFLARKIHADMDGKKTPRGKRGWKTFYAVLKGTVLYLQKDEYKPEKALSEEDLKNAVSVHHALASKATDYEKKPNVFKLKTADWRVLLFQTQSPEEMQGWINKINCVAAVFSAPPFPAAIGSQKKFSRPLLPATTTKLSQEEQLKSHESKLKQITTELAEHRSYPPDKKVKAKDVDEYKLKDHYLEFEKTRYEMYVSILKEGGKELLSNDESEAAGLKKSHSSPSLNPDTSPITAKVKRNVSERKDHRPETPSIKQKVT

SEQ ID NO: 20793 - protein, 71 aa, Artificial Sequence
  Synthetic polypeptide
QWFTKKMAPVPATSASPEKLLENADSQAPQTYGIRNSGMDPSSTCFTWCCRDICLGEQCICTFPECCQGQI

SEQ ID NO: 20794 - protein, 31 aa, Artificial Sequence
  Synthetic polypeptide
KIVRKCRFAGPTDLRHQKLWDGPQQQRHLFG

SEQ ID NO: 20795 - protein, 55 aa, Artificial Sequence
  Synthetic polypeptide
KMQIRRPHRPTASETLGWTPAAETFVWVNNASAHSQSVAKAKYEFLFGRSEGKAP

SEQ ID NO: 20796 - protein, 1061 aa, Artificial Sequence
  Synthetic polypeptide
KMQIRRPHRPTASETLGWTPAAETFVWVNNASAHSQSVAKAKYEFLFGRSEGKAPDTSDHGGSTLLPPNVTNEFPEYGTMEEGGEGLRASLEFDGEALPCHPQEQQGVQPLTGCHSGLDSVTEGPKDVREAPSQSHLKEQSLQPIDSLISALKATEARIISGTLQATKVLDQDAVSSFSVQQVEKELDTASRKTQRVNKTLPAGQKNLPEIPLSAEVTTEESFYLSIQKDLTALLTGDTQAEISQIMNNGRKGAVCVQEPSCPLASLGSSAVTCHSAGSVGFLKEQRSALGREHPGGCDRSSSMGRPGRVKHVEFQGVEILWTGGDKRETQHPIDFETSLQRTASPDSKESSKVPRHLISSAGLCNSSSLTENVWDESWKAPSERPGTSSGTFSPVRLDESGEDEVFLQENKQHLEKTPKPERDRERISEQEEHVKGEDEDILGPGYTEDSTDVYSSQFETILDNTSLYYSAESLETLYSEPDSYFSFEMPLTPMIQQRIKEGGQFLERTSGGGHQDILSVSADGGIVMGYSSGVTNGLNDASDSIYTKGTPEIAFWGSNAGVKTTRLEAHSEMGSTEILEKETPENLSNGTSSNVEAAKRLAKRLYQLDRFKRSDVAKHLGKNNEFSKLVAEEYLKFFDFTGMTLDQSLRYFFKAFSLVGETQERERVLIHFSNRYFYCNPDTIASQDGVHCLTCAIMLLNTDLHGHNIGKKMTCQEFIANLQGVNEGVDFSKDLLKALYNSIKNEKLEWAVDDEEKKKSPSESTEEKANGTHPKTISRIGSTTNPFLDIPHDPNAAVYKSGFLARKIHADMDGKKTPRGKRGWKTFYAVLKGTVLYLQKDEYKPEKALSEEDLKNAVSVHHALASKATDYEKKPNVFKLKTADWRVLLFQTQSPEEMQGWINKINCVAAVFSAPPFPAAIGSQKKFSRPLLPATTTKLSQEEQLKSHESKLKQITTELAEHRSYPPDKKVKAKDVDEYKLKDHYLEFEKTRYEMYVSILKEGGKELLSNDESEAAGLKKSHSSPSLNPDTSPITAKVKRNVSERKDHRPETPSIKQKVT

SEQ ID NO: 20797 - protein, 1063 aa, Artificial Sequence
  Synthetic polypeptide
KMQIRRPHRPTASETLGWTPAAETFVWVNNASAHSQSVAKAKYEFLFGRSEGKAPDTSDHGGSTLLPPNVTNEFPEYGTMEEGGEGLRASLEFDGEALPCHPQEQQGVQPLTGCHSGLDSVTEGPKDVREAPSQSHLKEQSLQPIDSLISALKATEARIISGTLQATKVLDQDAVSSFSVQQVEKELDTASRKTQRVNKTLPAGQKNLPEIPLSAEVTTEESFYLSIQKDLTALLTGDTQAEISQIMNNGRKGAVCVQEPSCPLASLGSSAVTCHSAGSVGFLKEQRSALGREHPGGCDRSSSMGRPGRVKHVEFQGVEILWTGGDKRETQHPIDFETSLQRTASPDSKESSKVPRHLISSAGLCNSSSLTENVWDESWKAPSERPGTSSGTFSPVRLDESGEDEVFLQENKQHLEKTPKPERDRERISEQEEHVKGEDEDILGPGYTEDSTDVYSSQFETILDNTSLYYSAESLETLYSEPDSYFSFEMPLTPMIQQRIKEGGQFLERTSGGGHQDILSVSADGGIVMGYSSGVTNGLNDASDSIYTKGTPEIAFWGSNAGVKTTRLEAHSEMGSTEILEKETPENLSNGTSSNVEAAKRLAKRLYQLDRFKRSDVAKHLGKNNEFSKLVAEEYLKFFDFTGMTLDQSLRYFFKAFSLVGETQERERVLIHFSNRYFYCNPDTIASQDGVHCLTCAIMLLNTDLHGHVSNIGKKMTCQEFIANLQGVNEGVDFSKDLLKALYNSIKNEKLEWAVDDEEKKKSPSESTEEKANGTHPKTISRIGSTTNPFLDIPHDPNAAVYKSGFLARKIHADMDGKKTPRGKRGWKTFYAVLKGTVLYLQKDEYKPEKALSEEDLKNAVSVHHALASKATDYEKKPNVFKLKTADWRVLLFQTQSPEEMQGWINKINCVAAVFSAPPFPAAIGSQKKFSRPLLPATTTKLSQEEQLKSHESKLKQITTELAEHRSYPPDKKVKAKDVDEYKLKDHYLEFEKTRYEMYVSILKEGGKELLSNDESEAAGLKKSHSSPSLNPDTSPITAKVKRNVSERKDHRPETPSIKQKVT

SEQ ID NO: 20798 - protein, 64 aa, Artificial Sequence
  Synthetic polypeptide
QWFTKKMAPVPATSASPEKLLENADSQAPQTYGIRNSGMDPSSRDICLGEQCICTFPECCQGQI

SEQ ID NO: 20799 - protein, 466 aa, Artificial Sequence
  Synthetic polypeptide
AYKTVSGVNGPLVILDHVKFPRYAEIVHLTLPDGTKRSGQVLEVSGSKAVVQVFEGTSGIDAKKTSCEFTGDILRTPVSEDMLGRVFNGSGKPIDRGPVVLAEDFLDIMGQPINPQCRIYPEEMIQTGISAIDGMNSIARGQKIPIFSAAGLPHNEIAAQICRQAGLVKKSKDVVDYSEENFAIVFAAMGVNMETARFFKSDFEENGSMDNVCLFLNLANDPTIERIITPRLALTTAEFLAYQCEKHVLVILTDMSSYAEALREVSAAREEVPGRRGFPGYMYTDLATIYERAGRVEGRNGSITQIPILTMPNDDITHPIPDLTGYITEGQIYVDRQLHNRQIYPPINVLPSLSRLMKSAIGEGMTRKDHADVSNQLYACYAIGKDVQAMKAVVGEEALTSDDLLYLEFLQKFERNFIAQGPYENRTVFETLDIGWQLLRIFPKEMLKRIPQSTLSEFYPRDSAKH

SEQ ID NO: 20800 - protein, 164 aa, Artificial Sequence
  Synthetic polypeptide
AYKTVSGVNGPLVILDHVKFPRYAEIVHLTLPDGTKRSGQVLEVSGSKAVVQVFEGTSGIDAKKTSCEFTGDILRTPVSEDMLGRVFNGSGKPIDRGPVVLAEDFLDIMGQPINPQCRIYPEEMIQTGISAIDGMNSIARGQKIPIFSAAGLPHNEVRTGIGLL

SEQ ID NO: 20801 - protein, 21 aa, Artificial Sequence
  Synthetic polypeptide
AYKTVSGVNGPLVILDHVKVC

SEQ ID NO: 20802 - protein, 27 aa, Artificial Sequence
  Synthetic polypeptide
LAKCCVLYKVFTFLPEHTRQYLESMVH

SEQ ID NO: 20803 - protein, 32 aa, Artificial Sequence
  Synthetic polypeptide
LNAASSIKFLLFSLSIQDSIWSQWSTSDLRSC

SEQ ID NO: 20804 - protein, 39 aa, Artificial Sequence
  Synthetic polypeptide
EVPAGRLPCQLSSLLPDGHQLPCGQLPGVSGLLCWHDWV

SEQ ID NO: 20805 - protein, 38 aa, Artificial Sequence
  Synthetic polypeptide
GAPLPGRDPVWEVRSISARPPCLRSEETLCLAAAPSEK

SEQ ID NO: 20806 - protein, 237 aa, Artificial Sequence
  Synthetic polypeptide
GAPLPGRDPVWEVRSISARPPCLRSEETLCLAAAPSEKSRLADFHANCRASYQTVTSCPADNYQACLGSYAGMIGFDMTPNYVDSSPTGIVVSPWCSCRGSGNMEEECEKFLRDFTENPCLRNAIQAFGNGTDVNVSPKGPSFQATQAPRVEKTPSLPDDLSDSTSLGTSVITTCTSVQEQGLKANNSKELSMCFTELTTNIIPGSNKVIKPNSGPSRARPSAALTVLSVLMLKLAL

SEQ ID NO: 20807 - protein, 25 aa, Artificial Sequence
  Synthetic polypeptide
GASLPGRPVCEVRRPSAWQPPRLRS

SEQ ID NO: 20808 - protein, 59 aa, Artificial Sequence
  Synthetic polypeptide
GASLPGRPVCEVRRPSAWQPPRLRSPGWPTSMPIVEPPTRRSPAALRTITRRVWALMLA

SEQ ID NO: 20809 - protein, 27 aa, Artificial Sequence
  Synthetic polypeptide
DVGSASAPPPRLGCEERLCPAATPSGR

SEQ ID NO: 20810 - protein, 226 aa, Artificial Sequence
  Synthetic polypeptide
DVGSASAPPPRLGCEERLCPAATPSGRSRLADFHANCRASYQTVTSCPADNYQACLGSYAGMIGFDMTPNYVDSSPTGIVVSPWCSCRGSGNMEEECEKFLRDFTENPCLRNAIQAFGNGTDVNVSPKGPSFQATQAPRVEKTPSLPDDLSDSTSLGTSVITTCTSVQEQGLKANNSKELSMCFTELTTNIIPGSNKVIKPNSGPSRARPSAALTVLSVLMLKLAL

SEQ ID NO: 20811 - protein, 50 aa, Artificial Sequence
  Synthetic polypeptide
GAPLPGRDPVWEVPAGRLPCQLSSLLPDGHQLPCGQLPGVSGLLCWHDWV

SEQ ID NO: 20812 - protein, 38 aa, Artificial Sequence
  Synthetic polypeptide
GASLPGRPSSEMWGAPLPRRPVWDVRSASARPRPRLGG

SEQ ID NO: 20813 - protein, 72 aa, Artificial Sequence
  Synthetic polypeptide
GASLPGRPSSEMWGAPLPRRPVWDVRSASARPRPRLGGPGWPTSMPIVEPPTRRSPAALRTITRRVWALMLA

SEQ ID NO: 20814 - protein, 42 aa, Artificial Sequence
  Synthetic polypeptide
AFHKVPAGRLPCQLSSLLPDGHQLPCGQLPGVSGLLCWHDWV

SEQ ID NO: 20815 - protein, 1 aa, Artificial Sequence
  Synthetic polypeptide
G

SEQ ID NO: 20816 - protein, 35 aa, Artificial Sequence
  Synthetic polypeptide
GPGWPTSMPIVEPPTRRSPAALRTITRRVWALMLA

SEQ ID NO: 20817 - protein, 10 aa, Artificial Sequence
  Synthetic polypeptide
SLALGEHSIR

SEQ ID NO: 20818 - protein, 209 aa, Artificial Sequence
  Synthetic polypeptide
SLALGEHSIRSRLADFHANCRASYQTVTSCPADNYQACLGSYAGMIGFDMTPNYVDSSPTGIVVSPWCSCRGSGNMEEECEKFLRDFTENPCLRNAIQAFGNGTDVNVSPKGPSFQATQAPRVEKTPSLPDDLSDSTSLGTSVITTCTSVQEQGLKANNSKELSMCFTELTTNIIPGSNKVIKPNSGPSRARPSAALTVLSVLMLKLAL

SEQ ID NO: 20819 - protein, 69 aa, Artificial Sequence
  Synthetic polypeptide
ATQKGPPHTVGSKHRIAPALERSARNRNRFPRGFVDLADDGSTAATWGRTGASSAGMTSTPTTARITSP

SEQ ID NO: 20820 - protein, 119 aa, Artificial Sequence
  Synthetic polypeptide
LGRRWLYGCDVGPDGRLLRGHDQYAYDGKDYIALNEDLRSWTAADTAAQITQRKWEAAREAEQRRAYLEGECVEWLRRYLENGKDKLERADPPKTHVTHHPISDHEATLRCWALGFYPA

SEQ ID NO: 20821 - protein, 246 aa, Artificial Sequence
  Synthetic polypeptide
LGRRWLYGCDVGPDGRLLRGHDQYAYDGKDYIALNEDLRSWTAADTAAQITQRKWEAAREAEQRRAYLEGECVEWLRRYLENGKDKLERADPPKTHVTHHPISDHEATLRCWALGFYPAEITLTWQRDGEDQTQDTELVETRPAGDRTFQKWAAVVVPSGEEQRYTCHVQHEGLPKPLTLRWEPSSQSTVPIVGIVAGLAVLAVVVIGAVVAAVMCRRKSSGGKGGSYSQAACSDSAQGSDVSLTA

SEQ ID NO: 20822 - protein, 72 aa, Artificial Sequence
  Synthetic polypeptide
NPRTGALREAGGSSFRPHRKALLTLWVVNIGSHQPLRDLLEIETGSLGASLTWQTMALRLRRGAGRAPPPRA

SEQ ID NO: 20823 - protein, 30 aa, Artificial Sequence
  Synthetic polypeptide
HFGRPRRADHKPCTRERLNLPLSPPMAGPP

SEQ ID NO: 20824 - protein, 69 aa, Artificial Sequence
  Synthetic polypeptide
PAWWLTPVVLALWEAEAGGSQALHQGTSKSSSLPAYGRTTLSRLQSTEFSPSGSETGSPGLQIYPYEML

SEQ ID NO: 20825 - protein, 126 aa, Artificial Sequence
  Synthetic polypeptide
PAWWLTPVVLALWEAEAGGSQALHQGTSKSSSLPAYGRTTLSRLQSTEFSPSGSETGSPGLQIYPYEMLVVTNKGRTKLPPGVDRMRLERHLSAEDFSRVFAMSPEEFGKLALWKRNELKKKASLF

SEQ ID NO: 20826 - protein, 148 aa, Artificial Sequence
  Synthetic polypeptide
PAWWLTPVVLALWEAEAGGSQALHQGTSKSSSLPAYGRTTLSRLQSTEFSPSGSETGSPGLQNGEGQRGRMDRGNSLPCVLEQKIYPYEMLVVTNKGRTKLPPGVDRMRLERHLSAEDFSRVFAMSPEEFGKLALWKRNELKKKASLF

SEQ ID NO: 20827 - protein, 28 aa, Artificial Sequence
  Synthetic polypeptide
PGMVAHTCCPSTLGGRGGRITSLAPGNV

SEQ ID NO: 20828 - protein, 262 aa, Artificial Sequence
  Synthetic polypeptide
HNALLSMKHPERSRARFPRIGELVLAYSATTARQEEVPQQTVAPQQQRHSFKGEECPAGSHRSEHTGACNPCTEGVDYTNASNNEPSCFPCTVCKSDQKHKSSCTMTRDTVCQCKEGTFRNENSPEMCRKCSRCPSGEVQVSNCTSWDDIQCVEEFGANATVETPAAEETMNTSPGTPAPAAEETMNTSPGTPAPAAEETMTTSPGTPAPAAEETMTTSPGTPAPAAEETMITSPGTPASSHYLSCTIVGIIVLIVLLIVFV

SEQ ID NO: 20829 - protein, 50 aa, Artificial Sequence
  Synthetic polypeptide
KIQGQVPQDWGVGPSLLCHHCPAGGSSPADSGPTATEAQLQGGGVSSRIS

SEQ ID NO: 20830 - protein, 17 aa, Artificial Sequence
  Synthetic polypeptide
SILKDPGPGSPGLGSWS

SEQ ID NO: 20831 - protein, 57 aa, Artificial Sequence
  Synthetic polypeptide
AWCLMPIILALWEAEVGGSFEARSSRPTGQIVTYQSCRTSICGASPSSVPSTPMASM

SEQ ID NO: 20832 - protein, 91 aa, Artificial Sequence
  Synthetic polypeptide
GQEFKTNWANSDISILQNLDLRGQSIFSTIHTYGLYVNFKNFVCNIGEDAELFMALYDPDQSTFIRTLAAWTSSGPASALCARLSAWAIWS

SEQ ID NO: 20833 - protein, 161 aa, Artificial Sequence
  Synthetic polypeptide
GQEFKTNWANSDISILQNLDLRGQSIFSTIHTYGLYVNFKNFVCNIGEDAELFMALYDPDQSTFISENYLIRWGSNGMPKEIEKLNNLQAVFTDLSSMDLIRPRVSLVCQIVRVGHMELKEGKKHTCGLRRPFGVAVMDITDIIHGKVDDEEKQHFIPFQQ

SEQ ID NO: 20834 - protein, 1681 aa, Artificial Sequence
  Synthetic polypeptide
GQEFKTNWANSDISILQNLDLRGQSIFSTIHTYGLYVNFKNFVCNIGEDAELFMALYDPDQSTFISENYLIRWGSNGMPKEIEKLNNLQAVFTDLSSMDLIRPRVSLVCQIVRVGHMELKEGKKHTCGLRRPFGVAVMDITDIIHGKVDDEEKQHFIPFQQIAMETYIRQRQLIMSPLITSHVIGENEPLTSVLNKVIAAKEVNHKGQGLWVSLKLLPGDLTQVQKNFSHLVDRSTAIARKMGFPEIILPGDVRNDIYVTLIHGEFDKGKKKTPKNVEVTMSVHDEEGKLLEKAIHPGAGYEGISEYKSVVYYQVKQPCWYETVKVSIAIEEVTRCHIRFTFRHRSSQETRDKSERAFGVAFVKLMNPDGTTLQDGRHDLVVYKGDNKKMEDAKFYLTLPGTKMEMEEKELQASKNLVTFTPSKDSTKDSFQIATLICSTKLTQNVDLLGLLNWRSNSQNIKHNLKKLMEVDGGEIVKFLQDTLDALFNIMMEMSDSETYDFLVFDALVFIISLIGDIKFQHFNPVLETYIYKHFSATLAYVKLSKVLNFYVANADDSSKTELLFAALKALKYLFRFIIQSRVLYLRFYGQSKDGDEFNNSIRQLFLAFNMLMDRPLEEAVKIKGAALKYLPSIINDVKLVFDPVELSVLFCKFIQSIPDNQLVRQKLNCMTKIVESTLFRQSECREVLLPLLTDQLSGQLDDNSNKPDHEASSQLLSNILEVLDRKDVGATAVHIQLIMERLLRRINRTVIGMNRQSPHIGSFVACMIALLQQMDDSHYSHYISTFKTRQDIIDFLMETFIMFKDLIGKNVYAKDWMVMNMTQNRVFLRAINQFAEVLTRFFMDQASFELQLWNNYFHLAVAFLTHESLQLETFSQAKRNKIVKKYGDMRKEIGFRIRDMWYNLGPHKIKFIPSMVGPILEVTLTPEVELRKATIPIFFDMMQCEFNFSGNGNFHMFENELITKLDQEVEGGRGDEQYKVLLEKLLLEHCRKHKYLSSSGEVFALLVSSLLENLLDYRTIIMQDESKENRMSCTVNVLNFYKEKKREDIYIRYLYKLRDLHRDCENYTEAAYTLLLHAELLQWSDKPCVPHLLQKDSYYVYTQQELKEKLYQEIISYFDKGKMWEKAIKLSKELAETYESKVFDYEGLGNLLKKRASFYENIIKAMRPQPEYFAVGYYGQGFPSFLRNKIFIYRGKEYERREDFSLRLLTQFPNAEKMTSTTPPGEDIKSSPKQYMQCFTVKPVMSLPPSYKDKPVPEQILNYYRANEVQQFRYSRPFRKGEKDPDNEFATMWIERTTYTTAYTFPGILKWFEVKQISTEEISPLENAIETMELTNERISNCVQQHAWDRSLSVHPLSMLLSGIVDPAVMGGFSNYEKAFFTEKYLQEHPEDQEKVELLKRLIALQMPLLTEGIRIHGEKLTEQLKPLHERLSSCFRELKEKVEKHYGVITLPPNLTERKQSRTGSIVLPYIMSSTLRRLSITSVTSSVVSTSSNSSDNAPSRPGSDGSILEPLLERRASSGARVEDLSLREENSENRISKFKRKDWSLSKSQVIAEKAPEPDLMSPTRKAQRPKSLQLMDNRLSPFHGSSPPQSTPLSPPPLTPKATRTLSSPSLQTDGIAATPVPPPPPPKSKPYEGSQRNSTELAPPLPVRREAKAPPPPPPKARKSGIPTSEPGSQ

SEQ ID NO: 20835 - protein, 54 aa, Artificial Sequence
  Synthetic polypeptide
HINPAEPRFAGPVHLQYHPHLWPLCELQELCLQHRGRCRVVYGPLRPRPVHFYQ

SEQ ID NO: 20836 - protein, 1090 aa, Artificial Sequence
  Synthetic polypeptide
HINPAEPRFAGPVHLQYHPHLWPLCELQELCLQHRGRCRVVYGPLRPRPVHFYQDLSSMDLIRPRVSLVCQIVRVGHMELKEGKKHTCGLRRPFGVAVMDITDIIHGKVDDEEKQHFIPFQQIAMETYIRQRQLIMSPLITSHVIGENEPLTSVLNKVIAAKEVNHKGQGLWVSLKLLPGDLTQVQKNFSHLVDRSTAIARKMGFPEIILPGDVRNDIYVTLIHGEFDKGKKKTPKNVEVTMSVHDEEGKLLEKAIHPGAGYEGISEYKSVVYYQVKQPCWYETVKVSIAIEEVTRCHIRFTFRHRSSQETRDKSERAFGVAFVKLMNPDGTTLQDGRHDLVVYKGDNKKMEDAKFYLTLPGTKMEMEEKELQASKNLVTFTPSKDSTKDSFQIATLICSTKLTQNVDLLGLLNWRSNSQNIKHNLKKLMEVDGGEIVKFLQDTLDALFNIMMEMSDSETYDFLVFDALVFIISLIGDIKFQHFNPVLETYIYKHFSATLAYVKLSKVLNFYVANADDSSKTELLFAALKALKYLFRFIIQSRVLYLRFYGQSKDGDEFNNSIRQLFLAFNMLMDRPLEEAVKIKGAALKYLPSIINDVKLVFDPVELSVLFCKFIQSIPDNQLVRQKLNCMTKIVESTLFRQSECREVLLPLLTDQLSGQLDDNSNKPDHEASSQLLSNILEVLDRKDVGATAVHIQLIMERLLRRINRTVIGMNRQSPHIGSFVACMIALLQQMDDSHYSHYISTFKTRQDIIDFLMETFIMFKDLIGKNVYAKDWMVMNMTQNRVFLRAINQFAEVLTRFFMDQASFELQLWNNYFHLAVAFLTHESLQLETFSQAKRNKIVKKYGDMRKEIGFRIRDMWYNLGPHKIKFIPSMVGPILEVTLTPEVELRKATIPIFFDMMQCEFNFSGNGNFHMFENELITKLDQEVEGGRGDEQYKVLLEKLLLEHCRKHKYLSSSGEVFALLVSSLLENLLDYRTIIMQDESKENRMSCTVNVLNFYKEKKREDIYIRYLYKLRDLHRDCENYTEAAYTLLLHAELLQVNGSESLFQQGGVQCPFRLNSIHFMILMGKNFIPGISFYTSFFSSF

SEQ ID NO: 20837 - protein, 43 aa, Artificial Sequence
  Synthetic polypeptide
GVGRLCRHLICRCLGLGLPASRTVHVTNGGQASAVPSWGPCRP

SEQ ID NO: 20838 - protein, 63 aa, Artificial Sequence
  Synthetic polypeptide
SAGALVLDFQPPELSMSQTAGKHLLYPAGVPVGPEACCPGALPAGLPDSCGHLHLSRATGTQR

SEQ ID NO: 20839 - protein, 64 aa, Artificial Sequence
  Synthetic polypeptide
SAGALVLDFQPPELSMSQTAGKHLLYPAGVPVGPEACCPGALPAGLPDSCGHLHLSSVQAAQLP

SEQ ID NO: 20840 - protein, 249 aa, Artificial Sequence
  Synthetic polypeptide
TPDLPVPWSWTSSLQNCPCHKRRASICCTQLGSLSALKHAVLGLYLLVFLILVGIFILAGPPGPKGDQGDEGKEGRPGIPGLPGLRGLPGERGTPGLPGPKGDDGKLGATGPMGMRGFKGDRGPKGEKGEKGDRAGDASGVEAPMMIRLVNGSGPHEGRVEVYHDRRWGTVCDDGWDKKDGDVVCRMLGFRGVEEVYRTARFGQGTGRIWMDDVACKGTEETIFRCSFSKWGVTNCGHAEDASVTCNRH

SEQ ID NO: 20841 - protein, 474 aa, Artificial Sequence
  Synthetic polypeptide
TPDLPVPWSWTSSLQNCPCHKRRASICCTQLGSLSALKHAVLGLYLLVFLILVGIFILAVSRPRSSPDDLKALTRNVNRLNESFRDLQLRLLQAPLQADLTEQVWKVQDALQNQSDSLLALAGAVQRLEGALWGLQAQAVQTEQAVALLRDRTGQQSDTAQLELYQLQVESNSSQLLLRRHAGLLDGLARRVGILGEELADVGGVLRGLNHSLSYDVALHRTRLQDLRVLVSNASEDTRRLRLAHVGMELQLKQELAMLNAVTEDLRLKDWEHSIALRNISLAKGPPGPKGDQGDEGKEGRPGIPGLPGLRGLPGERGTPGLPGPKGDDGKLGATGPMGMRGFKGDRGPKGEKGEKGDRAGDASGVEAPMMIRLVNGSGPHEGRVEVYHDRRWGTVCDDGWDKKDGDVVCRMLGFRGVEEVYRTARFGQGTGRIWMDDVACKGTEETIFRCSFSKWGVTNCGHAEDASVTCNRH

SEQ ID NO: 20842 - protein, 379 aa, Artificial Sequence
  Synthetic polypeptide
TPDLPVPWSWTSSLQNCPCHKRRASICCTQLGSLSALKHAVLGLYLLVFLILVGIFILAVSRPRSSPDDLKALTRNVNRLNESFRDLQLRLLQAPLQADLTEQVWKVQDALQNQSDSLLALAGAVQRLEGALWGLQAQAVQTEQAVALLRDRTGQQSDTAQLELYQLQVESNSSQLLLRRHAGLLDGLARRVGILGEELADVGGVLRGLNHSLSYDVALHRTRLQDLRVLVSNASEDTRRLRLAHVGMELQLKQELAMLNAVTEDLRLKDWEHSIALRNISLAKGPPGPKGDQGDEGKEGRPGIPGLPGLRGLPGERGTPGLPGPKGDDGKLGATGPMGMRGFKGDRGPKGEKGEKGDRAGDASKDILLGPWDMVLAQG

SEQ ID NO: 20843 - protein, 4 aa, Artificial Sequence
  Synthetic polypeptide
LWEC

SEQ ID NO: 20844 - protein, 63 aa, Artificial Sequence
  Synthetic polypeptide
LWECKTDLDIAYKFGKTVVSCEGYESSEDQYVLRGSCGLEYNLDYTELGLQKLKESGKQHGFA

SEQ ID NO: 20845 - protein, 145 aa, Artificial Sequence
  Synthetic polypeptide
LWECKTDLDIAYKFGKTVVSCEGYESSEDQYVLRGSCGLEYNLDYTELGLQKLKESGKQHGFASFSDYYYKWSSADSCNMSGLITIVVLLGIAFVVYKLFLSDGQYSPPPYSEYPPFSHRYQRFTNSAGPPPPGFKSEFTGPQNT

SEQ ID NO: 20846 - protein, 254 aa, Artificial Sequence
  Synthetic polypeptide
LWECKTDLDIAYKFGKTVVSCEGYESSEDQYVLRGSCGLEYNLDYTELGLQKLKESGKQHGFASFSDYYYKWSSADSCNMSGLITIVVLLGIAFVVYKLFLSDGQYSPPPYSEYPPFSHRYQRFTNSAGPPPPGFKSEFTGPQNTGHGATSGFGSAFTGQQGYENSGPGFWTGLGTGGILGYLFGSNRAATPFSDSWYYPSYPPSYPGTWNRAYSPLHGGSGSYSDMVVPGDDKVESWSQTLDAEILDFSSLSL

SEQ ID NO: 20847 - protein, 246 aa, Artificial Sequence
  Synthetic polypeptide
LWECKTDLDIAYKFGKTVVSCEGYESSEDQYVLRGSCGLEYNLDYTELGLQKLKESGKQHGFASFSDYYYKWSSADSCNMSGLITIVVLLGIAFVVYKLFLSDGQYSPPPYSEYPPFSHRYQRFTNSAGPPPPGFKSEFTGPQNTGHGATSGFGSAFTGQQGYENSGPGFWTGLGTGGILGYLFGSNRAATPFSDSWYYPSYPPSYPGTWNRAYSPLHGGSGSYSVCSNSDTKTRTASGYGGTRRR

SEQ ID NO: 20848 - protein, 7 aa, Artificial Sequence
  Synthetic polypeptide
QIIIVGM

SEQ ID NO: 20849 - protein, 43 aa, Artificial Sequence
  Synthetic polypeptide
SNKRKTASYPNEKLLTIKGHHQESEKTTYRMGGSLANHNCGNV

SEQ ID NO: 20850 - protein, 46 aa, Artificial Sequence
  Synthetic polypeptide
SNKRKTASYPNEKLLTIKGHHQESEKTTYRMGGSLANHNCGNVRRT

SEQ ID NO: 20851 - protein, 481 aa, Artificial Sequence
  Synthetic polypeptide
CRTLQHDVEQDSDQLDSSGMFHWCKPTSLDKVTLKRTGKSKYKFRNHIVACVFGDAHSAPMGLRNFVMPLRASNYTRKELKDIVFIGSLDYLQREWRFLWNFPQIYILPGCALYSGDLHAANIEQCSMCAVLSPPPQPSSNQTLVDTEAIMATLTIGSLQIDSSSDPSPSVSEETPGYTNGHNEKSNCRKVPILTELKNPSNIHFIEQLGGLEGSLQETNLHLSTAFSTGTVFSGSFLDSLLATAFYNYHVLELLQMLVTGGVSSQLEQHLDKDKVYGVADSCTSLLSGRNRCKLGLLSLHETILSDVNPRNTFGQLFCGSLDLFGILCVGLYRIIDEEELNPENKRFVITRPANEFKLLPSDLVFCAIPFSTACYKRNEEFSLQKSYEIVNKASQTTETHSDTNCPPTIDSVTETLYSPVYSYQPRTNSLSFPKQIAWNQSRTNSIISSQIPLGDNAKENERKTSDEVYDEDPFAYSEPL

SEQ ID NO: 20852 - protein, 279 aa, Artificial Sequence
  Synthetic polypeptide
CRTLQHDVEQDSDQLDSSGMFHWCKPTSLDKVTLKRTGKSKYKFRNHIVACVFGDAHSAPMGLRNFVMPLRASNYTRKELKDIVFIGSLDYLQREWRFLWNFPQIYILPGCALYSGDLHAANIEQCSMCAVLSPPPQPSSNQTLVDTEAIMATLTIGSLQIDSSSDPSPSVSEETPGYTNGHNEKSNCRKVPILTELKNPSNIHFIEQLGGLEGSLQETNLHLSTAFSTGTVFSGSFLDSLLATLMWKLAIKGSQFQGRSSGLCWPSTIIMSWNCFRCW

SEQ ID NO: 20853 - protein, 31 aa, Artificial Sequence
  Synthetic polypeptide
SLCPPGSGWLCGGETPFHLSNIYSVGLFNMM

SEQ ID NO: 20854 - protein, 95 aa, Artificial Sequence
  Synthetic polypeptide
DSDLVKNALCGKLQCENVQEIPVFGIVPAIIQTPSRGTKCWGVDFQLGSDVPDPGMVNEGTKCGAGKICRNFQCVDASVLNYDCDVQKKCHGHGK

SEQ ID NO: 20855 - protein, 259 aa, Artificial Sequence
  Synthetic polypeptide
DSDLVKNALCGKLQCENVQEIPVFGIVPAIIQTPSRGTKCWGVDFQLGSDVPDPGMVNEGTKCGAGKICRNFQCVDASVLNYDCDVQKKCHGHGVCNSNKNCHCENGWAPPNCETKGYGGSVDSGPTYNEMNTALRDGLLVFFFLIVPLIVCAIFIFIKRDQLWRSYFRKKRSQTYESDGKNQANPSRQPGSVPRHVSPVTPPREVPIYANRFAVPTYAAKQPQQFPSRPPPPQPKVSSQGNLIPARPAPAPPLYSSLT

SEQ ID NO: 20856 - protein, 152 aa, Artificial Sequence
  Synthetic polypeptide
DSDLVKNALCGKLQCENVQEIPVFGIVPAIIQTPSRGTKCWGVDFQLGSDVPDPGMVNEGTKCGAGKICRNFQCVDASVLNYDCDVQKKCHGHGVCNSNKNCHCENGWAPPNCETKGYGGSVDSGPTYNGQMAKIKQTLLDSRGVFLDMFLQ

SEQ ID NO: 20857 - protein, 68 aa, Artificial Sequence
  Synthetic polypeptide
DSDLVKNALCGKLQCENVQEIPVFGIVPAIIQTPSRGTKCWGVDFQLGSDVPDPGMVNEGTKCGAGKK

SEQ ID NO: 20858 - protein, 12 aa, Artificial Sequence
  Synthetic polypeptide
PGEECFVWKASV

SEQ ID NO: 20859 - protein, 41 aa, Artificial Sequence
  Synthetic polypeptide
RMLCVESFSVRMYKRYLYLELCLLLFKRLVEAPNVGVWISS

SEQ ID NO: 20860 - protein, 6 aa, Artificial Sequence
  Synthetic polypeptide
PGQQEM

SEQ ID NO: 20861 - protein, 134 aa, Artificial Sequence; identical to SEQ ID NO: 3231
  Synthetic polypeptide

SEQ ID NO: 20862 - protein, 35 aa, Artificial Sequence; identical to SEQ ID NO: 6124
  Synthetic polypeptide

SEQ ID NO: 20863 - protein, 22 aa, Artificial Sequence
  Synthetic polypeptide
TQEAEVAVSGDRAIALAWATGN

SEQ ID NO: 20864 - protein, 67 aa, Artificial Sequence; identical to SEQ ID NO: 4322
  Synthetic polypeptide

SEQ ID NO: 20865 - protein, 108 aa, Artificial Sequence
  Synthetic polypeptide
IALRMKIKEVKKENGDKKIVPKKKKPLKLGPIKKKDLKKLVLYLKNGADCPCHQLDNLSHHFLIMGRKVKSQYLLTAIHKWDKKNKEFKNFMKKMKNHECPTFQSVFK

SEQ ID NO: 20866 - protein, 47 aa, Artificial Sequence
  Synthetic polypeptide
STEDENKRSEKRKWRQEDCPQEEEAPEVGAHQEEGPEEACAVPEEWG

SEQ ID NO: 20867 - protein, 40 aa, Artificial Sequence
  Synthetic polypeptide
AACRQGQCLTDVSPPTQSTRQIQSKGFEDLDRSFARWFDR

SEQ ID NO: 20868 - protein, 76 aa, Artificial Sequence
  Synthetic polypeptide
LLVRLSCLLHCELLAGRDSVSLMFHLPLRAHGRYRVKGLKIWTDHSQGGSTDRLVQRRCRPGARGGDCRGAPGGSQ

SEQ ID NO: 20869 - protein, 98 aa, Artificial Sequence
  Synthetic polypeptide
LLVRLSCLLHCELLAGRDSVSLMFHLPLRAHGRYRVKGLKIWTDHSQGGSTDRLVQRRCRPGARGGGAEREWPTAGPDRGQEGGADSEAGQPEKGETV

SEQ ID NO: 20870 - protein, 74 aa, Artificial Sequence
  Synthetic polypeptide
LLVRLSCLLHCELLAGRDSVSLMFHLPLRAHGRYRVKGLKIWTDHSQGGSTDRLVQRRCRPGARGGSHLDTQPL

SEQ ID NO: 20871 - protein, 34 aa, Artificial Sequence
  Synthetic polypeptide
RFGQIIRKVVRQIDLSSADAAQEHEEDHTSTPNP

SEQ ID NO: 20872 - protein, 58 aa, Artificial Sequence
  Synthetic polypeptide
RFGQIIRKVVRQIDLSSADAAQEHEEVELRGSGLQPDLIEGRKGAQIVKRASLKRGKQ

SEQ ID NO: 20873 - protein, 59 aa, Artificial Sequence
  Synthetic polypeptide
RFGQIIRKVVRQIDLSSADAAQEHEEVTVEGPLEDPSELEVDIDYFMKHSKDHTSTPNP

SEQ ID NO: 20874 - protein, 83 aa, Artificial Sequence
  Synthetic polypeptide
RFGQIIRKVVRQIDLSSADAAQEHEEVTVEGPLEDPSELEVDIDYFMKHSKVELRGSGLQPDLIEGRKGAQIVKRASLKRGKQ

SEQ ID NO: 20875 - protein, 29 aa, Artificial Sequence
  Synthetic polypeptide
AMSQEALLPELRLLSGRCCYQLSESSKIR

SEQ ID NO: 20876 - protein, 13 aa, Artificial Sequence
  Synthetic polypeptide
APPPVRPMLLPAF

SEQ ID NO: 20877 - protein, 1810 aa, Artificial Sequence
  Synthetic polypeptide
ARKHCCLSSASCQADAATSFLRAARSGNLDKALDHLRNGVDINTCNQNGLNGLHLASKEGHVKMVVELLHKEIILETTTKKGNTALHIAALAGQDEVVRELVNYGANVNAQSQKGFTPLYMAAQENHLEVVKFLLENGANQNVATEDGFTPLAVALQQGHENVVAHLINYGTKGKVRLPALHIAARNDDTRTAAVLLQNDPNPDVLSKTGFTPLHIAAHYENLNVAQLLLNRGASVNFTPQNGITPLHIASRRGNVIMVRLLLDRGAQIETKTKDELTPLHCAARNGHVRISEILLDHGAPIQAKTKNGLSPIHMAAQGDHLDCVRLLLQYDAEIDDITLDHLTPLHVAAHCGHHRVAKVLLDKGAKPNSRALNGFTPLHIACKKNHVRVMELLLKTGASIDAVTESGLTPLHVASFMGHLPIVKNLLQRGASPNVSNVKVETPLHMAARAGHTEVAKYLLQNKAKVNAKAKDDQTPLHCAARIGHTNMVKLLLENNANPNLATTAGHTPLHIAAREGHVETVLALLEKEASQACMTKKGFTPLHVAAKYGKVRVAELLLERDAHPNAAGKNGLTPLHVAVHHNNLDIVKLLLPRGGSPHSPAWNGYTPLHIAAKQNQVEVARSLLQYGGSANAESVQGVTPLHLAAQEGHAEMVALLLSKQANGNLGNKSGLTPLHLVAQEGHVPVADVLIKHGVMVDATTRMGYTPLHVASHYGNIKLVKFLLQHQADVNAKTKLGYSPLHQAAQQGHTDIVTLLLKNGASPNEVSSDGTTPLAIAKRLGYISVTDVLKVVTDETSFVLVSDKHRMSFPETVDEILDVSEDEGEELISFKAERRDSRDVDEEKELLDFVPKLDQVVESPAIPRIPCAMPETVVIRSEEQEQASKEYDEDSLIPSSPATETSDNISPVASPVHTGFLVSFMVDARGGSMRGSRHNGLRVVIPPRTCAAPTRITCRLVKPQKLSTPPPLAEEEGLASRIIALGPTGAQFLSPVIVEIPHFASHGRGDRELVVLRSENGSVWKEHRSRYGESYLDQILNGMDEELGSLEELEKKRVCRIITTDFPLYFVIMSRLCQDYDTIGPEGGSLKSKLVPLVQATFPENAVTKRVKLALQAQPVPDELVTKLLGNQATFSPIVTVEPRRRKFHRPIGLRIPLPPSWTDNPRDSGEGDTTSLRLLCSVIGGTDQAQWEDITGTTKLVYANECANFTTNVSARFWLSDCPRTAEAVNFATLLYKELTAVPYMAKFVIFAKMNDPREGRLRCYCMTDDKVDKTLEQHENFVEVARSRDIEVLEGMSLFAELSGNLVPVKKAAQQRSFHFQSFRENRLAMPVKVRDSSREPGGSLSFLRKAMKYEDTQHILCHLNITMPPCAKGSGAEDRRRTPTPLALRYSILSESTPGSLSGTEQAEMKMAVISEHLGLSWAELARELQFSVEDINRIRVENPNSLLEQSVALLNLWVIREGQNANMENLYTALQSIDRGEIVNMLEGSGRQSRNLKPDRRHTDRDYSLSPSQMNGYSSLQDELLSPASLGCALSSPLRADQYWNEVAVLDAIPLAATEHDTMLEMSDMQVWSAGLTPSLVTAEDSSLECSKAEDSDATGHEWKLEGALSEEPRGPELGSLELVEDDTVDSDATNGLIDLLEQEEGQRSEEKLPGSKRQDDATGAGQDSENEVSLVSGHQRGQARITHSPTVSQVTERSQDRLQDWDADGSIVSYLQDAAQGSWQEEVTQGPHSFQGTSTMTEGLEPGGSQEYEKVLVSVSEHTWTEQPEAESSQADRDRRQQGQEEQVQEAKNTFTQVVQDHTSTPNP

SEQ ID NO: 20878 - protein, 1838 aa, Artificial Sequence
  Synthetic polypeptide
ARKHCCLSSASCQADAATSFLRAARSGNLDKALDHLRNGVDINTCNQNGLNGLHLASKEGHVKMVVELLHKEIILETTTKKGNTALHIAALAGQDEVVRELVNYGANVNAQSQKGFTPLYMAAQENHLEVVKFLLENGANQNVATEDGFTPLAVALQQGHENVVAHLINYGTKGKVRLPALHIAARNDDTRTAAVLLQNDPNPDVLSKTGFTPLHIAAHYENLNVAQLLLNRGASVNFTPQNGITPLHIASRRGNVIMVRLLLDRGAQIETKTKDELTPLHCAARNGHVRISEILLDHGAPIQAKTKNGLSPIHMAAQGDHLDCVRLLLQYDAEIDDITLDHLTPLHVAAHCGHHRVAKVLLDKGAKPNSRALNGFTPLHIACKKNHVRVMELLLKTGASIDAVTESGLTPLHVASFMGHLPIVKNLLQRGASPNVSNVKVETPLHMAARAGHTEVAKYLLQNKAKVNAKAKDDQTPLHCAARIGHTNMVKLLLENNANPNLATTAGHTPLHIAAREGHVETVLALLEKEASQACMTKKGFTPLHVAAKYGKVRVAELLLERDAHPNAAGKNGLTPLHVAVHHNNLDIVKLLLPRGGSPHSPAWNGYTPLHIAAKQNQVEVARSLLQYGGSANAESVQGVTPLHLAAQEGHAEMVALLLSKQANGNLGNKSGLTPLHLVAQEGHVPVADVLIKHGVMVDATTRMGYTPLHVASHYGNIKLVKFLLQHQADVNAKTKLGYSPLHQAAQQGHTDIVTLLLKNGASPNEVSSDGTTPLAIAKRLGYISVTDVLKVVTDETSFVLVSDKHRMSFPETVDEILDVSEDEGEELISFKAERRDSRDVDEEKELLDFVPKLDQVVESPAIPRIPCAMPETVVIRSEEQEQASKEYDEDSLIPSSPATETSDNISPVASPVHTGFLVSFMVDARGGSMRGSRHNGLRVVIPPRTCAAPTRITCRLVKPQKLSTPPPLAEEEGLASRIIALGPTGAQFLSPVIVEIPHFASHGRGDRELVVLRSENGSVWKEHRSRYGESYLDQILNGMDEELGSLEELEKKRVCRIITTDFPLYFVIMSRLCQDYDTIGPEGGSLKSKLVPLVQATFPENAVTKRVKLALQAQPVPDELVTKLLGNQATFSPIVTVEPRRRKFHRPIGLRIPLPPSWTDNPRDSGEGDTTSLRLLCSVIGGTDQAQWEDITGTTKLVYANECANFTTNVSARFWLSDCPRTAEAVNFATLLYKELTAVPYMAKFVIFAKMNDPREGRLRCYCMTDDKVDKTLEQHENFVEVARSRDIEVLEGMSLFAELSGNLVPVKKAAQQRSFHFQSFRENRLAMPVKVRDSSREPGGSLSFLRKAMKYEDTQHILCHLNITMPPCAKGSGAEDRRRTPTPLALRYSILSESTPGSLSGTEQAEMKMAVISEHLGLSWAELARELQFSVEDINRIRVENPNSLLEQSVALLNLWVIREGQNANMENLYTALQSIDRGEIVNMLEGSGRQSRNLKPDRRHTDRDYSLSPSQMNGYSSLQDELLSPASLGCALSSPLRADQYWNEVAVLDAIPLAATEHDTMLEMSDMQVWSAGLTPSLVTAEDSSLECSKAEDSDATGHEWKLEGALSEEPRGPELGSLELVEDDTVDSDATNGLIDLLEQEEGQRSEEKLPGSKRQDDATGAGQDSENEVSLVSGHQRGQARITHSPTVSQVTERSQDRLQDWDADGSIVSYLQDAAQGSWQEEVTQGPHSFQGTSTMTEGLEPGGSQEYEKVLVSVSEHTWTEQPEAESSQADRDRRQQGQEEQVQEAKNTFTQVVQGNEFQNIPGEQVTEEQFTDEQGNIVTKKDHTSTPNP

SEQ ID NO: 20879 - protein, 1884 aa, Artificial Sequence
  Synthetic polypeptide
ARKHCCLSSASCQADAATSFLRAARSGNLDKALDHLRNGVDINTCNQNGLNGLHLASKEGHVKMVVELLHKEIILETTTKKGNTALHIAALAGQDEVVRELVNYGANVNAQSQKGFTPLYMAAQENHLEVVKFLLENGANQNVATEDGFTPLAVALQQGHENVVAHLINYGTKGKVRLPALHIAARNDDTRTAAVLLQNDPNPDVLSKTGFTPLHIAAHYENLNVAQLLLNRGASVNFTPQNGITPLHIASRRGNVIMVRLLLDRGAQIETKTKDELTPLHCAARNGHVRISEILLDHGAPIQAKTKNGLSPIHMAAQGDHLDCVRLLLQYDAEIDDITLDHLTPLHVAAHCGHHRVAKVLLDKGAKPNSRALNGFTPLHIACKKNHVRVMELLLKTGASIDAVTESGLTPLHVASFMGHLPIVKNLLQRGASPNVSNVKVETPLHMAARAGHTEVAKYLLQNKAKVNAKAKDDQTPLHCAARIGHTNMVKLLLENNANPNLATTAGHTPLHIAAREGHVETVLALLEKEASQACMTKKGFTPLHVAAKYGKVRVAELLLERDAHPNAAGKNGLTPLHVAVHHNNLDIVKLLLPRGGSPHSPAWNGYTPLHIAAKQNQVEVARSLLQYGGSANAESVQGVTPLHLAAQEGHAEMVALLLSKQANGNLGNKSGLTPLHLVAQEGHVPVADVLIKHGVMVDATTRMGYTPLHVASHYGNIKLVKFLLQHQADVNAKTKLGYSPLHQAAQQGHTDIVTLLLKNGASPNEVSSDGTTPLAIAKRLGYISVTDVLKVVTDETSFVLVSDKHRMSFPETVDEILDVSEDEGEELISFKAERRDSRDVDEEKELLDFVPKLDQVVESPAIPRIPCAMPETVVIRSEEQEQASKEYDEDSLIPSSPATETSDNISPVASPVHTGFLVSFMVDARGGSMRGSRHNGLRVVIPPRTCAAPTRITCRLVKPQKLSTPPPLAEEEGLASRIIALGPTGAQFLSPVIVEIPHFASHGRGDRELVVLRSENGSVWKEHRSRYGESYLDQILNGMDEELGSLEELEKKRVCRIITTDFPLYFVIMSRLCQDYDTIGPEGGSLKSKLVPLVQATFPENAVTKRVKLALQAQPVPDELVTKLLGNQATFSPIVTVEPRRRKFHRPIGLRIPLPPSWTDNPRDSGEGDTTSLRLLCSVIGGTDQAQWEDITGTTKLVYANECANFTTNVSARFWLSDCPRTAEAVNFATLLYKELTAVPYMAKFVIFAKMNDPREGRLRCYCMTDDKVDKTLEQHENFVEVARSRDIEVLEGMSLFAELSGNLVPVKKAAQQRSFHFQSFRENRLAMPVKVRDSSREPGGSLSFLRKAMKYEDTQHILCHLNITMPPCAKGSGAEDRRRTPTPLALRYSILSESTPGSLSGTEQAEMKMAVISEHLGLSWAELARELQFSVEDINRIRVENPNSLLEQSVALLNLWVIREGQNANMENLYTALQSIDRGEIVNMLEGSGRQSRNLKPDRRHTDRDYSLSPSQMNGYSSLQDELLSPASLGCALSSPLRADQYWNEVAVLDAIPLAATEHDTMLEMSDMQVWSAGLTPSLVTAEDSSLECSKAEDSDATGHEWKLEGALSEEPRGPELGSLELVEDDTVDSDATNGLIDLLEQEEGQRSEEKLPGSKRQDDATGAGQDSENEVSLVSGHQRGQARITHSPTVSQVTERSQDRLQDWDADGSIVSYLQDAAQGSWQEEVTQGPHSFQGTSTMTEGLEPGGSQEYEKVLVSVSEHTWTEQPEAESSQADRDRRQQGQEEQVQEAKNTFTQVVQGNEFQNIPGEQVTEEQFTDEQGNIVTKKIIRKVVRQIDLSSADAAQEHEEVELRGSGLQPDLIEGRKGAQIVKRASLKRGKQ

SEQ ID NO: 20880 - protein, 1885 aa, Artificial Sequence
  Synthetic polypeptide
ARKHCCLSSASCQADAATSFLRAARSGNLDKALDHLRNGVDINTCNQNGLNGLHLASKEGHVKMVVELLHKEIILETTTKKGNTALHIAALAGQDEVVRELVNYGANVNAQSQKGFTPLYMAAQENHLEVVKFLLENGANQNVATEDGFTPLAVALQQGHENVVAHLINYGTKGKVRLPALHIAARNDDTRTAAVLLQNDPNPDVLSKTGFTPLHIAAHYENLNVAQLLLNRGASVNFTPQNGITPLHIASRRGNVIMVRLLLDRGAQIETKTKDELTPLHCAARNGHVRISEILLDHGAPIQAKTKNGLSPIHMAAQGDHLDCVRLLLQYDAEIDDITLDHLTPLHVAAHCGHHRVAKVLLDKGAKPNSRALNGFTPLHIACKKNHVRVMELLLKTGASIDAVTESGLTPLHVASFMGHLPIVKNLLQRGASPNVSNVKVETPLHMAARAGHTEVAKYLLQNKAKVNAKAKDDQTPLHCAARIGHTNMVKLLLENNANPNLATTAGHTPLHIAAREGHVETVLALLEKEASQACMTKKGFTPLHVAAKYGKVRVAELLLERDAHPNAAGKNGLTPLHVAVHHNNLDIVKLLLPRGGSPHSPAWNGYTPLHIAAKQNQVEVARSLLQYGGSANAESVQGVTPLHLAAQEGHAEMVALLLSKQANGNLGNKSGLTPLHLVAQEGHVPVADVLIKHGVMVDATTRMGYTPLHVASHYGNIKLVKFLLQHQADVNAKTKLGYSPLHQAAQQGHTDIVTLLLKNGASPNEVSSDGTTPLAIAKRLGYISVTDVLKVVTDETSFVLVSDKHRMSFPETVDEILDVSEDEGEELISFKAERRDSRDVDEEKELLDFVPKLDQVVESPAIPRIPCAMPETVVIRSEEQEQASKEYDEDSLIPSSPATETSDNISPVASPVHTGFLVSFMVDARGGSMRGSRHNGLRVVIPPRTCAAPTRITCRLVKPQKLSTPPPLAEEEGLASRIIALGPTGAQFLSPVIVEIPHFASHGRGDRELVVLRSENGSVWKEHRSRYGESYLDQILNGMDEELGSLEELEKKRVCRIITTDFPLYFVIMSRLCQDYDTIGPEGGSLKSKLVPLVQATFPENAVTKRVKLALQAQPVPDELVTKLLGNQATFSPIVTVEPRRRKFHRPIGLRIPLPPSWTDNPRDSGEGDTTSLRLLCSVIGGTDQAQWEDITGTTKLVYANECANFTTNVSARFWLSDCPRTAEAVNFATLLYKELTAVPYMAKFVIFAKMNDPREGRLRCYCMTDDKVDKTLEQHENFVEVARSRDIEVLEGMSLFAELSGNLVPVKKAAQQRSFHFQSFRENRLAMPVKVRDSSREPGGSLSFLRKAMKYEDTQHILCHLNITMPPCAKGSGAEDRRRTPTPLALRYSILSESTPGSLSGTEQAEMKMAVISEHLGLSWAELARELQFSVEDINRIRVENPNSLLEQSVALLNLWVIREGQNANMENLYTALQSIDRGEIVNMLEGSGRQSRNLKPDRRHTDRDYSLSPSQMNGYSSLQDELLSPASLGCALSSPLRADQYWNEVAVLDAIPLAATEHDTMLEMSDMQVWSAGLTPSLVTAEDSSLECSKAEDSDATGHEWKLEGALSEEPRGPELGSLELVEDDTVDSDATNGLIDLLEQEEGQRSEEKLPGSKRQDDATGAGQDSENEVSLVSGHQRGQARITHSPTVSQVTERSQDRLQDWDADGSIVSYLQDAAQGSWQEEVTQGPHSFQGTSTMTEGLEPGGSQEYEKVLVSVSEHTWTEQPEAESSQADRDRRQQGQEEQVQEAKNTFTQVVQGNEFQNIPGEQVTEEQFTDEQGNIVTKKIIRKVVRQIDLSSADAAQEHEEVTVEGPLEDPSELEVDIDYFMKHSKDHTSTPNP

SEQ ID NO: 20881 - protein, 1909 aa, Artificial Sequence
  Synthetic polypeptide
ARKHCCLSSASCQADAATSFLRAARSGNLDKALDHLRNGVDINTCNQNGLNGLHLASKEGHVKMVVELLHKEIILETTTKKGNTALHIAALAGQDEVVRELVNYGANVNAQSQKGFTPLYMAAQENHLEVVKFLLENGANQNVATEDGFTPLAVALQQGHENVVAHLINYGTKGKVRLPALHIAARNDDTRTAAVLLQNDPNPDVLSKTGFTPLHIAAHYENLNVAQLLLNRGASVNFTPQNGITPLHIASRRGNVIMVRLLLDRGAQIETKTKDELTPLHCAARNGHVRISEILLDHGAPIQAKTKNGLSPIHMAAQGDHLDCVRLLLQYDAEIDDITLDHLTPLHVAAHCGHHRVAKVLLDKGAKPNSRALNGFTPLHIACKKNHVRVMELLLKTGASIDAVTESGLTPLHVASFMGHLPIVKNLLQRGASPNVSNVKVETPLHMAARAGHTEVAKYLLQNKAKVNAKAKDDQTPLHCAARIGHTNMVKLLLENNANPNLATTAGHTPLHIAAREGHVETVLALLEKEASQACMTKKGFTPLHVAAKYGKVRVAELLLERDAHPNAAGKNGLTPLHVAVHHNNLDIVKLLLPRGGSPHSPAWNGYTPLHIAAKQNQVEVARSLLQYGGSANAESVQGVTPLHLAAQEGHAEMVALLLSKQANGNLGNKSGLTPLHLVAQEGHVPVADVLIKHGVMVDATTRMGYTPLHVASHYGNIKLVKFLLQHQADVNAKTKLGYSPLHQAAQQGHTDIVTLLLKNGASPNEVSSDGTTPLAIAKRLGYISVTDVLKVVTDETSFVLVSDKHRMSFPETVDEILDVSEDEGEELISFKAERRDSRDVDEEKELLDFVPKLDQVVESPAIPRIPCAMPETVVIRSEEQEQASKEYDEDSLIPSSPATETSDNISPVASPVHTGFLVSFMVDARGGSMRGSRHNGLRVVIPPRTCAAPTRITCRLVKPQKLSTPPPLAEEEGLASRIIALGPTGAQFLSPVIVEIPHFASHGRGDRELVVLRSENGSVWKEHRSRYGESYLDQILNGMDEELGSLEELEKKRVCRIITTDFPLYFVIMSRLCQDYDTIGPEGGSLKSKLVPLVQATFPENAVTKRVKLALQAQPVPDELVTKLLGNQATFSPIVTVEPRRRKFHRPIGLRIPLPPSWTDNPRDSGEGDTTSLRLLCSVIGGTDQAQWEDITGTTKLVYANECANFTTNVSARFWLSDCPRTAEAVNFATLLYKELTAVPYMAKFVIFAKMNDPREGRLRCYCMTDDKVDKTLEQHENFVEVARSRDIEVLEGMSLFAELSGNLVPVKKAAQQRSFHFQSFRENRLAMPVKVRDSSREPGGSLSFLRKAMKYEDTQHILCHLNITMPPCAKGSGAEDRRRTPTPLALRYSILSESTPGSLSGTEQAEMKMAVISEHLGLSWAELARELQFSVEDINRIRVENPNSLLEQSVALLNLWVIREGQNANMENLYTALQSIDRGEIVNMLEGSGRQSRNLKPDRRHTDRDYSLSPSQMNGYSSLQDELLSPASLGCALSSPLRADQYWNEVAVLDAIPLAATEHDTMLEMSDMQVWSAGLTPSLVTAEDSSLECSKAEDSDATGHEWKLEGALSEEPRGPELGSLELVEDDTVDSDATNGLIDLLEQEEGQRSEEKLPGSKRQDDATGAGQDSENEVSLVSGHQRGQARITHSPTVSQVTERSQDRLQDWDADGSIVSYLQDAAQGSWQEEVTQGPHSFQGTSTMTEGLEPGGSQEYEKVLVSVSEHTWTEQPEAESSQADRDRRQQGQEEQVQEAKNTFTQVVQGNEFQNIPGEQVTEEQFTDEQGNIVTKKIIRKVVRQIDLSSADAAQEHEEVTVEGPLEDPSELEVDIDYFMKHSKVELRGSGLQPDLIEGRKGAQIVKRASLKRGKQ

SEQ ID NO: 20882 - protein, 1862 aa, Artificial Sequence
  Synthetic polypeptide
ARKHCCLSSASCQADAATSFLRAARSGNLDKALDHLRNGVDINTCNQNGLNGLHLASKEGHVKMVVELLHKEIILETTTKKGNTALHIAALAGQDEVVRELVNYGANVNAQSQKGFTPLYMAAQENHLEVVKFLLENGANQNVATEDGFTPLAVALQQGHENVVAHLINYGTKGKVRLPALHIAARNDDTRTAAVLLQNDPNPDVLSKTGFTPLHIAAHYENLNVAQLLLNRGASVNFTPQNGITPLHIASRRGNVIMVRLLLDRGAQIETKTKDELTPLHCAARNGHVRISEILLDHGAPIQAKTKNGLSPIHMAAQGDHLDCVRLLLQYDAEIDDITLDHLTPLHVAAHCGHHRVAKVLLDKGAKPNSRALNGFTPLHIACKKNHVRVMELLLKTGASIDAVTESGLTPLHVASFMGHLPIVKNLLQRGASPNVSNVKVETPLHMAARAGHTEVAKYLLQNKAKVNAKAKDDQTPLHCAARIGHTNMVKLLLENNANPNLATTAGHTPLHIAAREGHVETVLALLEKEASQACMTKKGFTPLHVAAKYGKVRVAELLLERDAHPNAAGKNGLTPLHVAVHHNNLDIVKLLLPRGGSPHSPAWNGYTPLHIAAKQNQVEVARSLLQYGGSANAESVQGVTPLHLAAQEGHAEMVALLLSKQANGNLGNKSGLTPLHLVAQEGHVPVADVLIKHGVMVDATTRMGYTPLHVASHYGNIKLVKFLLQHQADVNAKTKLGYSPLHQAAQQGHTDIVTLLLKNGASPNEVSSDGTTPLAIAKRLGYISVTDVLKVVTDETSFVLVSDKHRMSFPETVDEILDVSEDEGEELISFKAERRDSRDVDEEKELLDFVPKLDQVVESPAIPRIPCAMPETVVIRSEEQEQASKEYDEDSLIPSSPATETSDNISPVASPVHTGFLVSFMVDARGGSMRGSRHNGLRVVIPPRTCAAPTRITCRLVKPQKLSTPPPLAEEEGLASRIIALGPTGAQFLSPVIVEIPHFASHGRGDRELVVLRSENGSVWKEHRSRYGESYLDQILNGMDEELGSLEELEKKRVCRIITTDFPLYFVIMSRLCQDYDTIGPEGGSLKSKLVPLVQATFPENAVTKRVKLALQAQPVPDELVTKLLGNQATFSPIVTVEPRRRKFHRPIGLRIPLPPSWTDNPRDSGEGDTTSLRLLCSVIGGTDQAQWEDITGTTKLVYANECANFTTNVSARFWLSDCPRTAEAVNFATLLYKELTAVPYMAKFVIFAKMNDPREGRLRCYCMTDDKVDKTLEQHENFVEVARSRDIEVLEGMSLFAELSGNLVPVKKAAQQRSFHFQSFRENRLAMPVKVRDSSREPGGSLSFLRKAMKYEDTQHILCHLNITMPPCAKGSGAEDRRRTPTPLALRYSILSESTPGSLSGTEQAEMKMAVISEHLGLSWAELARELQFSVEDINRIRVENPNSLLEQSVALLNLWVIREGQNANMENLYTALQSIDRGEIVNMLEGSGRQSRNLKPDRRHTDRDYSLSPSQMNGYSSLQDELLSPASLGCALSSPLRADQYWNEVAVLDAIPLAATEHDTMLEMSDMQVWSAGLTPSLVTAEDSSLECSKAEDSDATGHEWKLEGALSEEPRGPELGSLELVEDDTVDSDATNGLIDLLEQEEGQRSEEKLPGSKRQDDATGAGQDSENEVSLVSGHQRGQARITHSPTVSQVTERSQDRLQDWDADGSIVSYLQDAAQGSWQEEVTQGPHSFQGTSTMTEGLEPGGSQEYEKVLVSVSEHTWTEQPEAESSQADRDRRQQGQEEQVQEAKNTFTQVVQGNEFQNIPGEQVTEEQFTDEQGNIVTKKVELRGSGLQPDLIEGRKGAQIVKRASLKRGKQ

SEQ ID NO: 20883 - protein, 1868 aa, Artificial Sequence
  Synthetic polypeptide
ARKHCCLSSASCQADAATSFLRAARSGNLDKALDHLRNGVDINTCNQNGLNGLHLASKEGHVKMVVELLHKEIILETTTKKGNTALHIAALAGQDEVVRELVNYGANVNAQSQKGFTPLYMAAQENHLEVVKFLLENGANQNVATEDGFTPLAVALQQGHENVVAHLINYGTKGKVRLPALHIAARNDDTRTAAVLLQNDPNPDVLSKTGFTPLHIAAHYENLNVAQLLLNRGASVNFTPQNGITPLHIASRRGNVIMVRLLLDRGAQIETKTKDELTPLHCAARNGHVRISEILLDHGAPIQAKTKNGLSPIHMAAQGDHLDCVRLLLQYDAEIDDITLDHLTPLHVAAHCGHHRVAKVLLDKGAKPNSRALNGFTPLHIACKKNHVRVMELLLKTGASIDAVTESGLTPLHVASFMGHLPIVKNLLQRGASPNVSNVKVETPLHMAARAGHTEVAKYLLQNKAKVNAKAKDDQTPLHCAARIGHTNMVKLLLENNANPNLATTAGHTPLHIAAREGHVETVLALLEKEASQACMTKKGFTPLHVAAKYGKVRVAELLLERDAHPNAAGKNGLTPLHVAVHHNNLDIVKLLLPRGGSPHSPAWNGYTPLHIAAKQNQVEVARSLLQYGGSANAESVQGVTPLHLAAQEGHAEMVALLLSKQANGNLGNKSGLTPLHLVAQEGHVPVADVLIKHGVMVDATTRMGYTPLHVASHYGNIKLVKFLLQHQADVNAKTKLGYSPLHQAAQQGHTDIVTLLLKNGASPNEVSSDGTTPLAIAKRLGYISVTDVLKVVTDETSFVLVSDKHRMSFPETVDEILDVSEDEGTAHITIMGEELISFKAERRDSRDVDEEKELLDFVPKLDQVVESPAIPRIPCAMPETVVIRSEEQEQASKEYDEDSLIPSSPATETSDNISPVASPVHTGFLVSFMVDARGGSMRGSRHNGLRVVIPPRTCAAPTRITCRLVKPQKLSTPPPLAEEEGLASRIIALGPTGAQFLSPVIVEIPHFASHGRGDRELVVLRSENGSVWKEHRSRYGESYLDQILNGMDEELGSLEELEKKRVCRIITTDFPLYFVIMSRLCQDYDTIGPEGGSLKSKLVPLVQATFPENAVTKRVKLALQAQPVPDELVTKLLGNQATFSPIVTVEPRRRKFHRPIGLRIPLPPSWTDNPRDSGEGDTTSLRLLCSVIGGTDQAQWEDITGTTKLVYANECANFTTNVSARFWLSDCPRTAEAVNFATLLYKELTAVPYMAKFVIFAKMNDPREGRLRCYCMTDDKVDKTLEQHENFVEVARSRDIEVLEGMSLFAELSGNLVPVKKAAQQRSFHFQSFRENRLAMPVKVRDSSREPGGSLSFLRKAMKYEDTQHILCHLNITMPPCAKGSGAEDRRRTPTPLALRYSILSESTPGSLSGTEQAEMKMAVISEHLGLSWAELARELQFSVEDINRIRVENPNSLLEQSVALLNLWVIREGQNANMENLYTALQSIDRGEIVNMLEGSGRQSRNLKPDRRHTDRDYSLSPSQMNGYSSLQDELLSPASLGCALSSPLRADQYWNEVAVLDAIPLAATEHDTMLEMSDMQVWSAGLTPSLVTAEDSSLECSKAEDSDATGHEWKLEGALSEEPRGPELGSLELVEDDTVDSDATNGLIDLLEQEEGQRSEEKLPGSKRQDDATGAGQDSENEVSLVSGHQRGQARITHSPTVSQVTERSQDRLQDWDADGSIVSYLQDAAQGSWQEEVTQGPHSFQGTSTMTEGLEPGGSQEYEKVLVSVSEHTWTEQPEAESSQADRDRRQQGQEEQVQEAKNTFTQVVQGNEFQNIPGEQVTEEQFTDEQGNIVTKKIIRKVVRQIDLSSADAAQEHEEDHTSTPNP

SEQ ID NO: 20884 - protein, 61 aa, Artificial Sequence
  Synthetic polypeptide
EIAMDFGGLGGGRGLDPLPQGCGLAPLSEHLRGLVRDRPCGWAVQRCCHGSSHVWDPSICV

SEQ ID NO: 20885 - protein, 49 aa, Artificial Sequence
  Synthetic polypeptide
ERKELFLEVELHVRNCNGLWWARWWPWAGSAPARLWTGASFGTSSWPGS

SEQ ID NO: 20886 - protein, 66 aa, Artificial Sequence
  Synthetic polypeptide
SRTPCEKLQWTLVGSVVAVGWIRSRKAVDWRLFRNIFVAWFVTVPVAGLFSAAVMALLMYGILPYV

SEQ ID NO: 20887 - protein, 87 aa, Artificial Sequence
  Synthetic polypeptide
GQEFVGQETSLTNKANYKKKVLYHEYLTKASVRFRKQSPQYLKSYQVPRLMMTAPSRSREQQGRHWGPRKALLRAATLGLHTEEHCP

SEQ ID NO: 20888 - protein, 15 aa, Artificial Sequence
  Synthetic polypeptide
PTRQITKRRCFITSI

SEQ ID NO: 20889 - protein, 436 aa, Artificial Sequence
  Synthetic polypeptide
SQHFGRPRHVDHLRSGVRWSGDQPNQQGKLQKEGALSRVSDESLSKVQEAESPVFKELPGAKANDDSTIPLTGAAGETLGTSEGTSAGSHPRAAYGRALSMTHGSVKSPISNGTFGFDGHTRSDGHVYHTVHKDSGLYKDLLHKIHIDRGPEEKPAQESNYRLLRRNNSYTCYTAAICGLPVHATFRAADSSAPEDSEKLVGDTVSYSKKRLRYDSYSSYCNAVAEAEIEAEEGGVEMKLASELADPDQPREDPAEEEKEEKDAPEVHLLFHFLQVLTACFGSFAHGGNDVSNAIGPLVALWLIYKQGGVTQEAATPVWLLFYGGVGICTGLWVWGRRVIQTMGKDLTPITPSSGFTIELASAFTVVIASNIGLPVSTTHCKVGSVVAVGWIRSRKAVDWRLFRNIFVAWFVTVPVAGLFSAAVMALLMYGILPYV

SEQ ID NO: 20890 - protein, 49 aa, Artificial Sequence
  Synthetic polypeptide
ESQAVWAVQLRRGSSTNCFLITTSSSGLWKTFPTLSRYTLKWPSPSWPT

SEQ ID NO: 20891 - protein, 52 aa, Artificial Sequence
  Synthetic polypeptide
ESQAVWAVQLRRGSSTNCFLITTSSSGLWKTFPTLSRYTLKWPSPSWPTWMK

SEQ ID NO: 20892 - protein, 53 aa, Artificial Sequence
  Synthetic polypeptide
GLCKMCFVKQMLEGSMLLKSHHHSLISSTQGHKHCGRPQGPLPRKARLCGLCN

SEQ ID NO: 20893 - protein, 489 aa, Artificial Sequence
  Synthetic polypeptide
SQVPRDTNTAEGRRDLCLGKPGCVGCATEERLFHKLFSHYNQFIRPVENVSDPVTVHFEVAITQLANVDEVNQIMETNLWLRHIWNDYKLRWDPMEYDGIETLRVPADKIWKPDIVLYNNAVGDFQVEGKTKALLKYNGMITWTPPAIFKSSCPMDITFFPFDHQNCSLKFGSWTYDKAEIDLLIIGSKVDMNDFWENSEWEIIDASGYKHDIKYNCCEEIYTDITYSFYIRRLPMFYTINLIIPCLFISFLTVLVFYLPSDCGEKVTLCISVLLSLTVFLLVITETIPSTSLVVPLVGEYLLFTMIFVTLSIVVTVFVLNIHYRTPTTHTMPRWVKTVFLKLLPQVLLMRWPLDKTRGTGSDAVPRGLARRPAKGKLASHGEPRHLKECFHCHKSNELATSKRRLSHQPLQWVVENSEHSPEVEDVINSVQFIAENMKSHNETKEVEDDWKYVAMVVDRVFLWVFIIVCVFGTAGLFLQPLLGNTGKS

SEQ ID NO: 20894 - protein, 474 aa, Artificial Sequence
  Synthetic polypeptide
SQVPRDTNTAEGRRDLCLGKPGCVGCATEERLFHKLFSHYNQFIRPVENVSDPVTVHFEVAITQLANVIWNDYKLRWDPMEYDGIETLRVPADKIWKPDIVLYNNAVGDFQVEGKTKALLKYNGMITWTPPAIFKSSCPMDITFFPFDHQNCSLKFGSWTYDKAEIDLLIIGSKVDMNDFWENSEWEIIDASGYKHDIKYNCCEEIYTDITYSFYIRRLPMFYTINLIIPCLFISFLTVLVFYLPSDCGEKVTLCISVLLSLTVFLLVITETIPSTSLVVPLVGEYLLFTMIFVTLSIVVTVFVLNIHYRTPTTHTMPRWVKTVFLKLLPQVLLMRWPLDKTRGTGSDAVPRGLARRPAKGKLASHGEPRHLKECFHCHKSNELATSKRRLSHQPLQWVVENSEHSPEVEDVINSVQFIAENMKSHNETKEVEDDWKYVAMVVDRVFLWVFIIVCVFGTAGLFLQPLLGNTGKS

SEQ ID NO: 20895 - protein, 95 aa, Artificial Sequence
  Synthetic polypeptide
KYKISRAWWCMPVILATREAEAGELLEPGRQRLRWDQSGWRCGSGRCPPPRTHQAPPQASPERGVAGPTHAASAGAAVVAARVSLLETRKIRGPQ

SEQ ID NO: 20896 - protein, 63 aa, Artificial Sequence
  Synthetic polypeptide
LLGRLRQENCLNLGGRGCDGIRADGDAEAADARRPGHTRRRPRPARSGESRVQRMLLLLVLLL

SEQ ID NO: 20897 - protein, 224 aa, Artificial Sequence
  Synthetic polypeptide
TWEAEVAMGSERMEMRKRQMPAAQDTPGAAPGQPGAGSRGSNACCFCWCCCCSCSCLTVRNQEDQRPTIASHELRADLPTWEESPAPTLEEVNAWAQSFDKLMVTPAGRNAFREFLRTEFSEENMLFWMACEELKKEANKNIIEEKARIIYEDYISILSPKEVSLDSRVREVINRNMVEPSQHIFDDAQLQIYTLMHRDSYPRFMNSAVYKDLLQSLSEKSIEA

SEQ ID NO: 20898 - protein, 67 aa, Artificial Sequence
  Synthetic polypeptide
DQCRSRWDQSGWRCGSGRCPPPRTHQAPPQASPERGVAGPTHAASAGAAVVAARVSLLETRKIRGPQ

SEQ ID NO: 20899 - protein, 60 aa, Artificial Sequence
  Synthetic polypeptide
EQLRSVAPNEINAEADGIRADGDAEAADARRPGHTRRRPRPARSGESRVQRMLLLLVLLL

SEQ ID NO: 20900 - protein, 226 aa, Artificial Sequence
  Synthetic polypeptide
LPMRSMQKQMGSERMEMRKRQMPAAQDTPGAAPGQPGAGSRGSNACCFCWCCCCSCSCLTVRNQEDQRPTIASHELRADLPTWEESPAPTLEEVNAWAQSFDKLMVTPAGRNAFREFLRTEFSEENMLFWMACEELKKEANKNIIEEKARIIYEDYISILSPKEVSLDSRVREVINRNMVEPSQHIFDDAQLQIYTLMHRDSYPRFMNSAVYKDLLQSLSEKSIEA

SEQ ID NO: 20901 - protein, 40 aa, Artificial Sequence
  Synthetic polypeptide
DIIQLEKEMKCRYMLRHGLSAKTLRQVKGDSQQRSHTSHC

SEQ ID NO: 20902 - protein, 70 aa, Artificial Sequence
  Synthetic polypeptide
FMQPKCGNNPNVYLLMNGQTKCDVSIQTMRYYSTGKRNEVPIHATAWAKCKNITPSERRQPAKITYVSLL

SEQ ID NO: 20903 - protein, 79 aa, Artificial Sequence
  Synthetic polypeptide
FMQPKCGNNPNVYLLMNGQTKCDVSIQTMRYYSTGKRNEVPIHATAWAKCKNITPSERRQPAKITYVSLLETRKIRGPQ

SEQ ID NO: 20904 - protein, 13 aa, Artificial Sequence
  Synthetic polypeptide
KETASKDHIRLTV

SEQ ID NO: 20905 - protein, 178 aa, Artificial Sequence
  Synthetic polypeptide
KETASKDHIRLTVRNQEDQRPTIASHELRADLPTWEESPAPTLEEVNAWAQSFDKLMVTPAGRNAFREFLRTEFSEENMLFWMACEELKKEANKNIIEEKARIIYEDYISILSPKEVSLDSRVREVINRNMVEPSQHIFDDAQLQIYTLMHRDSYPRFMNSAVYKDLLQSLSEKSIEA

SEQ ID NO: 20906 - protein, 97 aa, Artificial Sequence
  Synthetic polypeptide
FMQPKCGNNPNVYLLMNGQTKCDVSIQTMRYYSTGKRNEVPIHATAWAKCKNITPSERRQPAKITYGMLHNRQIYRDRKRIRACLGPVEWGDTVSLL

SEQ ID NO: 20907 - protein, 106 aa, Artificial Sequence
  Synthetic polypeptide
FMQPKCGNNPNVYLLMNGQTKCDVSIQTMRYYSTGKRNEVPIHATAWAKCKNITPSERRQPAKITYGMLHNRQIYRDRKRIRACLGPVEWGDTVSLLETRKIRGPQ

SEQ ID NO: 20908 - protein, 21 aa, Artificial Sequence
  Synthetic polypeptide
RQEADSCLPRAGRVGRYSLTV

SEQ ID NO: 20909 - protein, 186 aa, Artificial Sequence
  Synthetic polypeptide
RQEADSCLPRAGRVGRYSLTVRNQEDQRPTIASHELRADLPTWEESPAPTLEEVNAWAQSFDKLMVTPAGRNAFREFLRTEFSEENMLFWMACEELKKEANKNIIEEKARIIYEDYISILSPKEVSLDSRVREVINRNMVEPSQHIFDDAQLQIYTLMHRDSYPRFMNSAVYKDLLQSLSEKSIEA

SEQ ID NO: 20910 - protein, 8 aa, Artificial Sequence
  Synthetic polypeptide
SGEIQSHC

SEQ ID NO: 20911 - protein, 61 aa, Artificial Sequence
  Synthetic polypeptide
CLLWAHDLGMVAHMPGTDGQKPLQVSEVHISNISARMRLILLGFHQIHRRMNLGLNRQQKI

SEQ ID NO: 20912 - protein, 44 aa, Artificial Sequence
  Synthetic polypeptide
CLLWAHDLGMVAHMPGTDGQKPLQVSEVHISNISARMRLLGLLH

SEQ ID NO: 20913 - protein, 28 aa, Artificial Sequence
  Synthetic polypeptide
PICQARMGRSLCRYQKFTYQIYLPACAC

SEQ ID NO: 20914 - protein, 27 aa, Artificial Sequence
  Synthetic polypeptide
PICQARMGRSLCRYQKFTYQIYLPACV

SEQ ID NO: 20915 - protein, 192 aa, Artificial Sequence
  Synthetic polypeptide
SRLCDKECLNCLVMSTLGPRSRNGSPYARHGWAEAFAGIRSSHIKYICPHAFDIIGLSPDSQEDESGIKQAAENIKALIDQEVKNGIPSNRIILGGFSQGGALSLYTALTTQQKLAGVTALSCWLPLRASFPQGPIGGANRDISILQCHGDCDPLVPLMFGSLTVEKLKTLVNPANVTFKTYEGMMHSSCQQ

SEQ ID NO: 20916 - protein, 209 aa, Artificial Sequence
  Synthetic polypeptide
SRLCDKECLNCLVMSTLGPRSRNGSPYARHGWAEAFAGIRSSHIKYICPHAFDIIGLSPDSQEDESGIKQAAENIKALIDQEVKNGIPSNRIILGGFSQGGALSLYTALTTQQKLAGVTALSCWLPLRASFPQGPIGGANRDISILQCHGDCDPLVPLMFGSLTVEKLKTLVNPANVTFKTYEGMMHSSCQQEMMDVKQFIDKLLPPID

SEQ ID NO: 20917 - protein, 225 aa, Artificial Sequence
  Synthetic polypeptide
SRLCDKECLNCLVMSTLGPRSRNGSPYARHGWAEAFAGIRSSHIKYICPHAPVRPVTLNMNVAMPSWFDIIGLSPDSQEDESGIKQAAENIKALIDQEVKNGIPSNRIILGGFSQGGALSLYTALTTQQKLAGVTALSCWLPLRASFPQGPIGGANRDISILQCHGDCDPLVPLMFGSLTVEKLKTLVNPANVTFKTYEGMMHSSCQQEMMDVKQFIDKLLPPID

SEQ ID NO: 20918 - protein, 34 aa, Artificial Sequence
  Synthetic polypeptide
GRSFIFIYCPYHTAETGRCHCTQLLASTSGFLST

SEQ ID NO: 20919 - protein, 40 aa, Artificial Sequence
  Synthetic polypeptide
GRSFIFIYCPYHTAETGRCHCTQLLASTSGFLSTGSYRWC

SEQ ID NO: 20920 - protein, 85 aa, Artificial Sequence
  Synthetic polypeptide
GWAQWCTPVIPALWEAKVGRSRGQEFETSLTSMVKPCHGGALVIPATREAEGGALSLYTALTTQQKLAGVTALSCWLPLRASFPQ

SEQ ID NO: 20921 - protein, 144 aa, Artificial Sequence
  Synthetic polypeptide
GWAQWCTPVIPALWEAKVGRSRGQEFETSLTSMVKPCHGGALVIPATREAEGGALSLYTALTTQQKLAGVTALSCWLPLRASFPQGPIGGANRDISILQCHGDCDPLVPLMFGSLTVEKLKTLVNPANVTFKTYEGMMHSSCQQ

SEQ ID NO: 20922 - protein, 161 aa, Artificial Sequence
  Synthetic polypeptide
GWAQWCTPVIPALWEAKVGRSRGQEFETSLTSMVKPCHGGALVIPATREAEGGALSLYTALTTQQKLAGVTALSCWLPLRASFPQGPIGGANRDISILQCHGDCDPLVPLMFGSLTVEKLKTLVNPANVTFKTYEGMMHSSCQQEMMDVKQFIDKLLPPID

SEQ ID NO: 20923 - protein, 42 aa, Artificial Sequence
  Synthetic polypeptide
SQLLGRLREELYLYILPLPHSRNWQVSLHSVAGFHFGLPFHR

SEQ ID NO: 20924 - protein, 66 aa, Artificial Sequence
  Synthetic polypeptide
SQLLGRLREELYLYILPLPHSRNWQVSLHSVAGFHFGLPFHRVLSVVLIEIFLFSSATGIVTLWFP

SEQ ID NO: 20925 - protein, 7 aa, Artificial Sequence
  Synthetic polypeptide
GLLGLLH

SEQ ID NO: 20926 - protein, 53 aa, Artificial Sequence
  Synthetic polypeptide
GWAQWCTPVIPALWEAKVGRSRGQEFETSLTSMVKPCHGGALVIPATREAEAC

SEQ ID NO: 20927 - protein, 182 aa, Artificial Sequence
  Synthetic polypeptide
SQLLGRLRPVRPVTLNMNVAMPSWFDIIGLSPDSQEDESGIKQAAENIKALIDQEVKNGIPSNRIILGGFSQGGALSLYTALTTQQKLAGVTALSCWLPLRASFPQGPIGGANRDISILQCHGDCDPLVPLMFGSLTVEKLKTLVNPANVTFKTYEGMMHSSCQQEMMDVKQFIDKLLPPID

SEQ ID NO: 20928 - protein, 74 aa, Artificial Sequence
  Synthetic polypeptide
SQLLGRLRPVRPVTLNMNVAMPSWFDIIGLSPDSQEDESGIKQAAENIKALIDQEVKNGIPSNRIILGGFSQVR

SEQ ID NO: 20929 - protein, 46 aa, Artificial Sequence
  Synthetic polypeptide
GTDGQKPLQVSEVHISNISARMRLILLGFHQIHRRMNLGLNRQQKI

SEQ ID NO: 20930 - protein, 29 aa, Artificial Sequence
  Synthetic polypeptide
GTDGQKPLQVSEVHISNISARMRLLGLLH

SEQ ID NO: 20931 - protein, 75 aa, Artificial Sequence
  Synthetic polypeptide
GWAQWCTPVIPALWEAKVGRSRGQEFETSLTSMVKPCHGGALVIPATREAEARMGRSLCRYQKFTYQIYLPACAC

SEQ ID NO: 20932 - protein, 74 aa, Artificial Sequence
  Synthetic polypeptide
GWAQWCTPVIPALWEAKVGRSRGQEFETSLTSMVKPCHGGALVIPATREAEARMGRSLCRYQKFTYQIYLPACV

SEQ ID NO: 20933 - protein, 171 aa, Artificial Sequence
  Synthetic polypeptide
SQLLGRLRHGWAEAFAGIRSSHIKYICPHAFDIIGLSPDSQEDESGIKQAAENIKALIDQEVKNGIPSNRIILGGFSQGGALSLYTALTTQQKLAGVTALSCWLPLRASFPQGPIGGANRDISILQCHGDCDPLVPLMFGSLTVEKLKTLVNPANVTFKTYEGMMHSSCQQ

SEQ ID NO: 20934 - protein, 188 aa, Artificial Sequence
  Synthetic polypeptide
SQLLGRLRHGWAEAFAGIRSSHIKYICPHAFDIIGLSPDSQEDESGIKQAAENIKALIDQEVKNGIPSNRIILGGFSQGGALSLYTALTTQQKLAGVTALSCWLPLRASFPQGPIGGANRDISILQCHGDCDPLVPLMFGSLTVEKLKTLVNPANVTFKTYEGMMHSSCQQEMMDVKQFIDKLLPPID

SEQ ID NO: 20935 - protein, 204 aa, Artificial Sequence
  Synthetic polypeptide
SQLLGRLRHGWAEAFAGIRSSHIKYICPHAPVRPVTLNMNVAMPSWFDIIGLSPDSQEDESGIKQAAENIKALIDQEVKNGIPSNRIILGGFSQGGALSLYTALTTQQKLAGVTALSCWLPLRASFPQGPIGGANRDISILQCHGDCDPLVPLMFGSLTVEKLKTLVNPANVTFKTYEGMMHSSCQQEMMDVKQFIDKLLPPID

SEQ ID NO: 20936 - protein, 41 aa, Artificial Sequence
  Synthetic polypeptide
GWAQWCTPVIPALWEAKARMGRSLCRYQKFTYQIYLPACAC

SEQ ID NO: 20937 - protein, 40 aa, Artificial Sequence
  Synthetic polypeptide
GWAQWCTPVIPALWEAKARMGRSLCRYQKFTYQIYLPACV

SEQ ID NO: 20938 - protein, 62 aa, Artificial Sequence
  Synthetic polypeptide
MGAVVHACNPSTLGGQGTDGQKPLQVSEVHISNISARMRLILLGFHQIHRRMNLGLNRQQKI

SEQ ID NO: 20939 - protein, 45 aa, Artificial Sequence
  Synthetic polypeptide
MGAVVHACNPSTLGGQGTDGQKPLQVSEVHISNISARMRLLGLLH

SEQ ID NO: 20940 - protein, 171 aa, Artificial Sequence
  Synthetic polypeptide
SQHFGRPRHGWAEAFAGIRSSHIKYICPHAFDIIGLSPDSQEDESGIKQAAENIKALIDQEVKNGIPSNRIILGGFSQGGALSLYTALTTQQKLAGVTALSCWLPLRASFPQGPIGGANRDISILQCHGDCDPLVPLMFGSLTVEKLKTLVNPANVTFKTYEGMMHSSCQQ

SEQ ID NO: 20941 - protein, 188 aa, Artificial Sequence
  Synthetic polypeptide
SQHFGRPRHGWAEAFAGIRSSHIKYICPHAFDIIGLSPDSQEDESGIKQAAENIKALIDQEVKNGIPSNRIILGGFSQGGALSLYTALTTQQKLAGVTALSCWLPLRASFPQGPIGGANRDISILQCHGDCDPLVPLMFGSLTVEKLKTLVNPANVTFKTYEGMMHSSCQQEMMDVKQFIDKLLPPID

SEQ ID NO: 20942 - protein, 204 aa, Artificial Sequence
  Synthetic polypeptide
SQHFGRPRHGWAEAFAGIRSSHIKYICPHAPVRPVTLNMNVAMPSWFDIIGLSPDSQEDESGIKQAAENIKALIDQEVKNGIPSNRIILGGFSQGGALSLYTALTTQQKLAGVTALSCWLPLRASFPQGPIGGANRDISILQCHGDCDPLVPLMFGSLTVEKLKTLVNPANVTFKTYEGMMHSSCQQEMMDVKQFIDKLLPPID

SEQ ID NO: 20943 - protein, 8 aa, Artificial Sequence
  Synthetic polypeptide
PGLLGLLH

SEQ ID NO: 20944 - protein, 48 aa, Artificial Sequence
  Synthetic polypeptide
QMRWLMPVISALWEVEAGGSPEVRSSGPAWPTWRNPISTKNTKISQAC

SEQ ID NO: 20945 - protein, 212 aa, Artificial Sequence
  Synthetic polypeptide
SQHFGRWRRADHLRSGVQDQPGQHGETPSLLKIQKLARPVRPVTLNMNVAMPSWFDIIGLSPDSQEDESGIKQAAENIKALIDQEVKNGIPSNRIILGGFSQGGALSLYTALTTQQKLAGVTALSCWLPLRASFPQGPIGGANRDISILQCHGDCDPLVPLMFGSLTVEKLKTLVNPANVTFKTYEGMMHSSCQQEMMDVKQFIDKLLPPID

SEQ ID NO: 20946 - protein, 104 aa, Artificial Sequence
  Synthetic polypeptide
SQHFGRWRRADHLRSGVQDQPGQHGETPSLLKIQKLARPVRPVTLNMNVAMPSWFDIIGLSPDSQEDESGIKQAAENIKALIDQEVKNGIPSNRIILGGFSQVR

SEQ ID NO: 20947 - protein, 47 aa, Artificial Sequence
  Synthetic polypeptide
PGTDGQKPLQVSEVHISNISARMRLILLGFHQIHRRMNLGLNRQQKI

SEQ ID NO: 20948 - protein, 30 aa, Artificial Sequence
  Synthetic polypeptide
PGTDGQKPLQVSEVHISNISARMRLLGLLH

SEQ ID NO: 20949 - protein, 70 aa, Artificial Sequence
  Synthetic polypeptide
QMRWLMPVISALWEVEAGGSPEVRSSGPAWPTWRNPISTKNTKISQARMGRSLCRYQKFTYQIYLPACAC

SEQ ID NO: 20950 - protein, 69 aa, Artificial Sequence
  Synthetic polypeptide
QMRWLMPVISALWEVEAGGSPEVRSSGPAWPTWRNPISTKNTKISQARMGRSLCRYQKFTYQIYLPACV

SEQ ID NO: 20951 - protein, 201 aa, Artificial Sequence
  Synthetic polypeptide
SQHFGRWRRADHLRSGVQDQPGQHGETPSLLKIQKLARHGWAEAFAGIRSSHIKYICPHAFDIIGLSPDSQEDESGIKQAAENIKALIDQEVKNGIPSNRIILGGFSQGGALSLYTALTTQQKLAGVTALSCWLPLRASFPQGPIGGANRDISILQCHGDCDPLVPLMFGSLTVEKLKTLVNPANVTFKTYEGMMHSSCQQ

SEQ ID NO: 20952 - protein, 218 aa, Artificial Sequence
  Synthetic polypeptide
SQHFGRWRRADHLRSGVQDQPGQHGETPSLLKIQKLARHGWAEAFAGIRSSHIKYICPHAFDIIGLSPDSQEDESGIKQAAENIKALIDQEVKNGIPSNRIILGGFSQGGALSLYTALTTQQKLAGVTALSCWLPLRASFPQGPIGGANRDISILQCHGDCDPLVPLMFGSLTVEKLKTLVNPANVTFKTYEGMMHSSCQQEMMDVKQFIDKLLPPID

SEQ ID NO: 20953 - protein, 234 aa, Artificial Sequence
  Synthetic polypeptide
SQHFGRWRRADHLRSGVQDQPGQHGETPSLLKIQKLARHGWAEAFAGIRSSHIKYICPHAPVRPVTLNMNVAMPSWFDIIGLSPDSQEDESGIKQAAENIKALIDQEVKNGIPSNRIILGGFSQGGALSLYTALTTQQKLAGVTALSCWLPLRASFPQGPIGGANRDISILQCHGDCDPLVPLMFGSLTVEKLKTLVNPANVTFKTYEGMMHSSCQQEMMDVKQFIDKLLPPID

SEQ ID NO: 20954 - protein, 7 aa, Artificial Sequence
  Synthetic polypeptide
GLLGLLH

SEQ ID NO: 20955 - protein, 24 aa, Artificial Sequence
  Synthetic polypeptide
QMRWLMPVISALWEVEAGGSPEAC

SEQ ID NO: 20956 - protein, 188 aa, Artificial Sequence
  Synthetic polypeptide
SQHFGRWRRADHLRPVRPVTLNMNVAMPSWFDIIGLSPDSQEDESGIKQAAENIKALIDQEVKNGIPSNRIILGGFSQGGALSLYTALTTQQKLAGVTALSCWLPLRASFPQGPIGGANRDISILQCHGDCDPLVPLMFGSLTVEKLKTLVNPANVTFKTYEGMMHSSCQQEMMDVKQFIDKLLPPID

SEQ ID NO: 20957 - protein, 80 aa, Artificial Sequence
  Synthetic polypeptide
SQHFGRWRRADHLRPVRPVTLNMNVAMPSWFDIIGLSPDSQEDESGIKQAAENIKALIDQEVKNGIPSNRIILGGFSQVR

SEQ ID NO: 20958 - protein, 46 aa, Artificial Sequence; identical to SEQ ID NO: 20929
  Synthetic polypeptide

SEQ ID NO: 20959 - protein, 29 aa, Artificial Sequence
  Synthetic polypeptide
GTDGQKPLQVSEVHISNISARMRLLGLLH

SEQ ID NO: 20960 - protein, 46 aa, Artificial Sequence
  Synthetic polypeptide
QMRWLMPVISALWEVEAGGSPEARMGRSLCRYQKFTYQIYLPACAC

SEQ ID NO: 20961 - protein, 45 aa, Artificial Sequence
  Synthetic polypeptide
QMRWLMPVISALWEVEAGGSPEARMGRSLCRYQKFTYQIYLPACV

SEQ ID NO: 20962 - protein, 177 aa, Artificial Sequence
  Synthetic polypeptide
SQHFGRWRRADHLRHGWAEAFAGIRSSHIKYICPHAFDIIGLSPDSQEDESGIKQAAENIKALIDQEVKNGIPSNRIILGGFSQGGALSLYTALTTQQKLAGVTALSCWLPLRASFPQGPIGGANRDISILQCHGDCDPLVPLMFGSLTVEKLKTLVNPANVTFKTYEGMMHSSCQQ

SEQ ID NO: 20963 - protein, 194 aa, Artificial Sequence
  Synthetic polypeptide
SQHFGRWRRADHLRHGWAEAFAGIRSSHIKYICPHAFDIIGLSPDSQEDESGIKQAAENIKALIDQEVKNGIPSNRIILGGFSQGGALSLYTALTTQQKLAGVTALSCWLPLRASFPQGPIGGANRDISILQCHGDCDPLVPLMFGSLTVEKLKTLVNPANVTFKTYEGMMHSSCQQEMMDVKQFIDKLLPPID

SEQ ID NO: 20964 - protein, 210 aa, Artificial Sequence
  Synthetic polypeptide
SQHFGRWRRADHLRHGWAEAFAGIRSSHIKYICPHAPVRPVTLNMNVAMPSWFDIIGLSPDSQEDESGIKQAAENIKALIDQEVKNGIPSNRIILGGFSQGGALSLYTALTTQQKLAGVTALSCWLPLRASFPQGPIGGANRDISILQCHGDCDPLVPLMFGSLTVEKLKTLVNPANVTFKTYEGMMHSSCQQEMMDVKQFIDKLLPPID

SEQ ID NO: 20965 - protein, 177 aa, Artificial Sequence
  Synthetic polypeptide
FQHFGRLRQEDHLRHGWAEAFAGIRSSHIKYICPHAFDIIGLSPDSQEDESGIKQAAENIKALIDQEVKNGIPSNRIILGGFSQGGALSLYTALTTQQKLAGVTALSCWLPLRASFPQGPIGGANRDISILQCHGDCDPLVPLMFGSLTVEKLKTLVNPANVTFKTYEGMMHSSCQQ

SEQ ID NO: 20966 - protein, 194 aa, Artificial Sequence
  Synthetic polypeptide
FQHFGRLRQEDHLRHGWAEAFAGIRSSHIKYICPHAFDIIGLSPDSQEDESGIKQAAENIKALIDQEVKNGIPSNRIILGGFSQGGALSLYTALTTQQKLAGVTALSCWLPLRASFPQGPIGGANRDISILQCHGDCDPLVPLMFGSLTVEKLKTLVNPANVTFKTYEGMMHSSCQQEMMDVKQFIDKLLPPID

SEQ ID NO: 20967 - protein, 210 aa, Artificial Sequence
  Synthetic polypeptide
FQHFGRLRQEDHLRHGWAEAFAGIRSSHIKYICPHAPVRPVTLNMNVAMPSWFDIIGLSPDSQEDESGIKQAAENIKALIDQEVKNGIPSNRIILGGFSQGGALSLYTALTTQQKLAGVTALSCWLPLRASFPQGPIGGANRDISILQCHGDCDPLVPLMFGSLTVEKLKTLVNPANVTFKTYEGMMHSSCQQEMMDVKQFIDKLLPPID

SEQ ID NO: 20968 - protein, 47 aa, Artificial Sequence
  Synthetic polypeptide
GRVQWLMPVIPALWEAEAGGSSEARMGRSLCRYQKFTYQIYLPACAC

SEQ ID NO: 20969 - protein, 46 aa, Artificial Sequence
  Synthetic polypeptide
GRVQWLMPVIPALWEAEAGGSSEARMGRSLCRYQKFTYQIYLPACV

SEQ ID NO: 20970 - protein, 46 aa, Artificial Sequence; identical to SEQ ID NO: 20929
  Synthetic polypeptide

SEQ ID NO: 20971 - protein, 29 aa, Artificial Sequence
  Synthetic polypeptide
GTDGQKPLQVSEVHISNISARMRLLGLLH

SEQ ID NO: 20972 - protein, 39 aa, Artificial Sequence
  Synthetic polypeptide
DLLSSLELPPTHHDFRQVIQPSCPHLFKNKKIQTSQEDD

SEQ ID NO: 20973 - protein, 33 aa, Artificial Sequence
  Synthetic polypeptide
PGTATNPPRLQASYSAFLSPSVQKQKDPDISRR

SEQ ID NO: 20974 - protein, 40 aa, Artificial Sequence
  Synthetic polypeptide
QICFLAWNCHQPTTTSGKLFSLPVPICSKTKRSRHLKKMT

SEQ ID NO: 20975 - protein, 92 aa, Artificial Sequence
  Synthetic polypeptide
QICFLAWNCHQPTTTSGKLFSLPVPICSKTKRSRHLKKMTEEYPALPQGAEASLPLTGSASCGVPGILRKMWTRHKKKSEYVGATNSAFEAD

SEQ ID NO: 20976 - protein, 386 aa, Artificial Sequence
  Synthetic polypeptide
AIIMLLHSSLGNKPSDKEMFSRSVTSLATDAPASSEQNGALTNGDILSEDSTLTCMQHYEEVQTSASDLLDSQDSTGKPKCHQSRELPRIPPESAVDTMLTARSVDGDQGLGMEGPYEVLKDSSSQENMVEDCLYETVKEIKEVAAAAHLEKGHSGKAKSTSASKELPGPQTEGKAEFAEYASVDRNKKCRQSVNVESILGNSCDPEEEAPPPVPVKLLDENENLQEKEGGEAEESATDTTSETNKRFSSLSYKSREEDPTLTEEEISAMYSSVNKPGQLVNKSGQSLTVPESTYTSIQGDPQRSPSSCNDLYATVKDFEKTPNSTLPPAGRPSEEPEPDYEAIQTLNREEEKATLGTNGHHGLVPKENDYESISDLQQGRDITRL

SEQ ID NO: 20977 - protein, 39 aa, Artificial Sequence
  Synthetic polypeptide
GRRISWAQEFETSVSYNHATALQPGQQAFRQGDVQPFSY

SEQ ID NO: 20978 - protein, 50 aa, Artificial Sequence
  Synthetic polypeptide
SCYCTPAWATSLQTRRCSAVQLLAWQQMLLPAVSRMGHSPMGTFFQRTVL

SEQ ID NO: 20979 - protein, 48 aa, Artificial Sequence
  Synthetic polypeptide
CMLRIIILYLFFSLEEESSKQGRFQLNMALRISTKERSIGNSTTRYSR

SEQ ID NO: 20980 - protein, 126 aa, Artificial Sequence
  Synthetic polypeptide
LRGRVQQARKIPAQYGFTYFYKGKEYWKFNNQILKVEPGYPRSILKDFMGCDGPTDRVKEGHSPPDDVDIVIKLDNTASTVKAIAIVIPCILALCLLVLVYTVFQFKRKGTPRHILYCKRSMQEWV

SEQ ID NO: 20981 - protein, 49 aa, Artificial Sequence
  Synthetic polypeptide
RKSPASKEDSSSIWLYVFLQRKGVLEIQQPDTQGRTWISKIHPQGFYGL

SEQ ID NO: 20982 - protein, 57 aa, Artificial Sequence
  Synthetic polypeptide
MSSALNALPNILCIFITFSFFRFWCISSERSSLTFLLKVTNIGCSRIQLFNLVTLMT

SEQ ID NO: 20983 - protein, 5 aa, Artificial Sequence
  Synthetic polypeptide
PFYLK

SEQ ID NO: 20984 - protein, 200 aa, Artificial Sequence
  Synthetic polypeptide
SNKYWVFKDTTLQPGYPHDLITLGSGIPPHGIDSAIWWEDVGKTYFFKGDRYWRYSEEMKTMDPGYPKPITVWKGIPESPQGAFVHKENGFTYFYKGKEYWKFNNQILKVEPGYPRSILKDFMGCDGPTDRVKEGHSPPDDVDIVIKLDNTASTVKAIAIVIPCILALCLLVLVYTVFQFKRKGTPRHILYCKRSMQEWV

SEQ ID NO: 20985 - protein, 22 aa, Artificial Sequence
  Synthetic polypeptide
EGVSRGDSGLNGEDLPSISSVG

SEQ ID NO: 20986 - protein, 82 aa, Artificial Sequence
  Synthetic polypeptide
EGVSRGDSGLNGEDLPSISSVGSALPRRRCCAYITIGMICIFIGVGLTVGTPDFARRFRATYVSWAIAYLLGLICLIRACYW

SEQ ID NO: 20987 - protein, 95 aa, Artificial Sequence
  Synthetic polypeptide
EGVSRGDSGLNGEDLPSISSVGSALPRRRCCAYITIGMICIFIGVGLTVGTPDFARRFRATYVSWAIAYLLGLICLIRACYWGAIRVSYPEHSFA

SEQ ID NO: 20988 - protein, 12 aa, Artificial Sequence
  Synthetic polypeptide
MEKICPQSPQWV

SEQ ID NO: 20989 - protein, 27 aa, Artificial Sequence
  Synthetic polypeptide
MEKICPQSPQWVVHFHEDAAVHILPLE

SEQ ID NO: 20990 - protein, 17 aa, Artificial Sequence
  Synthetic polypeptide
RRQWTEWRRSALNLLSG

SEQ ID NO: 20991 - protein, 2 aa, Artificial Sequence
  Synthetic polypeptide
AR

SEQ ID NO: 20992 - protein, 39 aa, Artificial Sequence
  Synthetic polypeptide
GQMKVILSAVSCIMEMKLLFLFLICCSSVLWIWLAKILF

SEQ ID NO: 20993 - protein, 75 aa, Artificial Sequence
  Synthetic polypeptide
PDEGYSFSSVLYYGNEATLLIFDLLFFCVVDLACQNFILASFLTYLQQEIFRYIRNTVGQKNLASKTLVDQRFLI

SEQ ID NO: 20994 - protein, 72 aa, Artificial Sequence
  Synthetic polypeptide
GTHARLSTRHTEFEEREYVVLIRINDGGRPPLEGIVSLPGIILAVVFIRIKKDKGKDNVESAQASEVKPLRS

SEQ ID NO: 20995 - protein, 110 aa, Artificial Sequence
  Synthetic polypeptide
GTHARLSTRHTEFEEREYVVLIRINDGGRPPLEGIVSLPVTFCSCVEGSCFRPAGHQTGIPTVGMAVGILLTTLLVIGIILAVVFIRIKKDKGKDNVESAQASEVKPLRS

SEQ ID NO: 20996 - protein, 22 aa, Artificial Sequence
  Synthetic polypeptide
IKVLMPDCLPGTQSLRRGSMSS

SEQ ID NO: 20997 - protein, 69 aa, Artificial Sequence
  Synthetic polypeptide
VQQTSLLSYFQKLPQPSQPSATTNIETGNDLQQKDYDSLKGQIIISIFWQQSTFKLRYSCPTVYQAHRV

SEQ ID NO: 20998 - protein, 27 aa, Artificial Sequence
  Synthetic polypeptide
DSNSVPPLPVIRIWQLDMAKRGSLVDP

SEQ ID NO: 20999 - protein, 12 aa, Artificial Sequence
  Synthetic polypeptide
EFGNWIWPRGEV

SEQ ID NO: 21000 - protein, 144 aa, Artificial Sequence
  Synthetic polypeptide
GFKLGASTTSDKNLATGYGQEGKFSGPLKPMTFSIYEGQEPSQIIFQFKANPPAVTFELTGETDNIFVIEREGLLYYNRALDRETRSTHNLQVAALDANGIIVEGPVPITIKVKDINDNRPTFLQSKYEGSVRQNSRPGKPFLY

SEQ ID NO: 21001 - protein, 829 aa, Artificial Sequence
  Synthetic polypeptide
GFKLGASTTSDKNLATGYGQEGKFSGPLKPMTFSIYEGQEPSQIIFQFKANPPAVTFELTGETDNIFVIEREGLLYYNRALDRETRSTHNLQVAALDANGIIVEGPVPITIKVKDINDNRPTFLQSKYEGSVRQNSRPGKPFLYVNATDLDDPATPNGQLYYQIVIQLPMINNVMYFQINNKTGAISLTREGSQELNPAKNPSYNLVISVKDMGGQSENSFSDTTSVDIIVTENIWKAPKPVEMVENSTDPHPIKITQVRWNDPGAQYSLVDKEKLPRFPFSIDQEGDIYVTQPLDREEKDAYVFYAVAKDEYGKPLSYPLEIHVKVKDINDNPPTCPSPVTVFEVQENERLGNSIGTLTAHDRDEENTANSFLNYRIVEQTPKLPMDGLFLIQTYAGMLQLAKQSLKKQDTPQYNLTIEVSDKDFKTLCFVQINVIDINDQIPIFEKSDYGNLTLAEDTNIGSTILTIQATDADEPFTGSSKILYHIIKGDSEGRLGVDTDPHTNTGYVIIKKPLDFETAAVSNIVFKAENPEPLVFGVKYNASSFAKFTLIVTDVNEAPQFSQHVFQAKVSEDVAIGTKVGNVTAKDPEGLDISYSLRGDTRGWLKIDHVTGEIFSVAPLDREAGSPYRVQVVATEVGGSSLSSVSEFHLILMDVNDNPPRLAKDYTGLFFCHPLSAPGSLIFEATDDDQHLFRGPHFTFSLGSGSLQNDWEVSKINGTHARLSTRHTEFEEREYVVLIRINDGGRPPLEGIVSLPVTFCSCVEGSCFRPAGHQTGIPTVGMAVGILLTTLLVIGIILAVVFIRIKKDKGKDNVESAQASEVKPLRS

SEQ ID NO: 21002 - protein, 577 aa, Artificial Sequence
  Synthetic polypeptide
GFKLGASTTSDKNLATGYGQEGKFSGPLKPMTFSIYEGQEPSQIIFQFKANPPAVTFELTGETDNIFVIEREGLLYYNRALDRETRSTHNLQVAALDANGIIVEGPVPITIKVKDINDNRPTFLQSKYEGSVRQNSRPGNSIGTLTAHDRDEENTANSFLNYRIVEQTPKLPMDGLFLIQTYAGMLQLAKQSLKKQDTPQYNLTIEVSDKDFKTLCFVQINVIDINDQIPIFEKSDYGNLTLAEDTNIGSTILTIQATDADEPFTGSSKILYHIIKGDSEGRLGVDTDPHTNTGYVIIKKPLDFETAAVSNIVFKAENPEPLVFGVKYNASSFAKFTLIVTDVNEAPQFSQHVFQAKVSEDVAIGTKVGNVTAKDPEGLDISYSLRGDTRGWLKIDHVTGEIFSVAPLDREAGSPYRVQVVATEVGGSSLSSVSEFHLILMDVNDNPPRLAKDYTGLFFCHPLSAPGSLIFEATDDDQHLFRGPHFTFSLGSGSLQNDWEVSKINGTHARLSTRHTEFEEREYVVLIRINDGGRPPLEGIVSLPGIILAVVFIRIKKDKGKDNVESAQASEVKPLRS

SEQ ID NO: 21003 - protein, 92 aa, Artificial Sequence
  Synthetic polypeptide
EVPFTLCHDSEASPAMWNYMCIAIAISLLMILICAMATYGAYKQRAAWIIPFFCYQIFDFALNMLVAITVLIYPNSIQEYIRQLPPNFPYRD

SEQ ID NO: 21004 - protein, 174 aa, Artificial Sequence
  Synthetic polypeptide
EVPFTLCHDSEASPAMWNYMCIAIAISLLMILICAMATYGAYKQRAAWIIPFFCYQIFDFALNMLVAITVLIYPNSIQEYIRQLPPNFPYRDDVMSVNPTCLVLIILLFISIILTFKGYLISCVWNCYRYINGRNSSDVLVYVTSNDTTVLLPPYDDATVNGAAKEPPPPYVSA

SEQ ID NO: 21005 - protein, 47 aa, Artificial Sequence
  Synthetic polypeptide
GLPSHVELHVHCHCDFSSHDPDMCYGYLRSVQATRSLDHPILLLPDL

SEQ ID NO: 21006 - protein, 44 aa, Artificial Sequence
  Synthetic polypeptide
SLLLFLHSVLSPPCKKSLSPFAMILRPPQPCGTTCALPLRFLFS

SEQ ID NO: 21007 - protein, 66 aa, Artificial Sequence
  Synthetic polypeptide
IGGDTIKCTVGSWIRFWKRKRTLKGNRHVHCHCDFSSHDPDMCYGYLRSVQATRSLDHPILLLPDL

SEQ ID NO: 21008 - protein, 23 aa, Artificial Sequence
  Synthetic polypeptide
ILEKKKDIEGEQTCALPLRFLFS

SEQ ID NO: 21009 - protein, 77 aa, Artificial Sequence
  Synthetic polypeptide
RGTDMCIAIAISLLMILICAMATYGAYKQRAAWIIPFFCYQIFDFALNMLVAITVLIYPNSIQEYIRQLPPNFPYRD

SEQ ID NO: 21010 - protein, 159 aa, Artificial Sequence
  Synthetic polypeptide
RGTDMCIAIAISLLMILICAMATYGAYKQRAAWIIPFFCYQIFDFALNMLVAITVLIYPNSIQEYIRQLPPNFPYRDDVMSVNPTCLVLIILLFISIILTFKGYLISCVWNCYRYINGRNSSDVLVYVTSNDTTVLLPPYDDATVNGAAKEPPPPYVSA

SEQ ID NO: 21011 - protein, 35 aa, Artificial Sequence; identical to SEQ ID NO: 6122
  Synthetic polypeptide

SEQ ID NO: 21012 - protein, 15 aa, Artificial Sequence
  Synthetic polypeptide
EDHLSLEEQRLCSSP

SEQ ID NO: 21013 - protein, 264 aa, Artificial Sequence; identical to SEQ ID NO: 2619
  Synthetic polypeptide

SEQ ID NO: 21014 - protein, 51 aa, Artificial Sequence
  Synthetic polypeptide
AGARPPRRLGSVTVFLPPLYKRQFYLCDRWALLCLCHRDHRQSYTQQHVYS

SEQ ID NO: 21015 - protein, 395 aa, Artificial Sequence
  Synthetic polypeptide
GALQCFCHLCTKDNFTCVTDGLCFVSVTETTDKVIHNSMCIAEIDLIPRDRPFVCAPSSKTGSVTTTYCCNQDHCNKIELPTTGLPLLVQRTIARTIVLQESIGKGRFGEVWRGKWRGEEVAVKIFSSREERSWFREAEIYQTVMLRHENILGFIAADNKDNGTWTQLWLVSDYHEHGSLFDYLNRYTVTVEGMIKLALSTASGLAHLHMEIVGTQGKPAIAHRDLKSKNILVKKNGTCCIADLGLAVRHDSATDTIDIAPNHRVGTKRYMAPEVLDDSINMKHFESFKRADIYAMGLVFWEIARRCSIGGIHEDYQLPYYDLVPSDPSVEEMRKVVCEQKLRPNIPNRWQSCEALRVMAKIMRECWYANGAARLTALRIKKTLSQLSQQEGIKM

SEQ ID NO: 21016 - protein, 352 aa, Artificial Sequence
  Synthetic polypeptide
GALQCFCHLCTKDNFTCVTDGLCFVSVTETTDKVIHNSMCIAEIDLIPRDRPFVCAPSSKTGSVTTTYCCNQDHCNKIELPTTGPFSVKSSPGLGPVELAAVIAGPVCFVCISLMLMVYICHNRTVIHHRVPNEEDPSLDRPFISEGTTLKDLIYDMTTSGSGSGLPLLVQRTIARTIVLQESIGKGRFGEVWRGKWRGEEVAVKIFSSREERSWFREAEIYQTVMLRHENILGFIAADNKDNGTWTQLWLVSDYHEHGSLFDYLNRYTVTVEGMIKLALSTASGLAHLHMEIVGTQGKPAIAHRDLKSKNILVKKNGTCCIADLGLAVRHDSATDTIDIAPNHRVGTKRNS

SEQ ID NO: 21017 - protein, 476 aa, Artificial Sequence
  Synthetic polypeptide
GALQCFCHLCTKDNFTCVTDGLCFVSVTETTDKVIHNSMCIAEIDLIPRDRPFVCAPSSKTGSVTTTYCCNQDHCNKIELPTTGPFSVKSSPGLGPVELAAVIAGPVCFVCISLMLMVYICHNRTVIHHRVPNEEDPSLDRPFISEGTTLKDLIYDMTTSGSGSGLPLLVQRTIARTIVLQESIGKGRFGEVWRGKWRGEEVAVKIFSSREERSWFREAEIYQTVMLRHENILGFIAADNKDNGTWTQLWLVSDYHEHGSLFDYLNRYTVTVEGMIKLALSTASGLAHLHMEIVGTQGKPAIAHRDLKSKNILVKKNGTCCIADLGLAVRHDSATDTIDIAPNHRVGTKRYMAPEVLDDSINMKHFESFKRADIYAMGLVFWEIARRCSIGGIHEDYQLPYYDLVPSDPSVEEMRKVVCEQKLRPNIPNRWQSCEALRVMAKIMRECWYANGAARLTALRIKKTLSQLSQQEGIKM

SEQ ID NO: 21018 - protein, 160 aa, Artificial Sequence
  Synthetic polypeptide
GALQCFCHLCTKDNFTCVTDGLCFVSVTETTDKVIHNSMCIAEIDLIPRDRPFVCAPSSKTGSVTTTYCCNQDHCNKIELPTTVKSSPGLGPVELAAVIAGPVCFVCISLMLMVYICHNRTVIHHRVPNEEDPSLDRPFISEGTTLKDLIYDMTTSGSGS

SEQ ID NO: 21019 - protein, 472 aa, Artificial Sequence
  Synthetic polypeptide
GALQCFCHLCTKDNFTCVTDGLCFVSVTETTDKVIHNSMCIAEIDLIPRDRPFVCAPSSKTGSVTTTYCCNQDHCNKIELPTTVKSSPGLGPVELAAVIAGPVCFVCISLMLMVYICHNRTVIHHRVPNEEDPSLDRPFISEGTTLKDLIYDMTTSGSGSGLPLLVQRTIARTIVLQESIGKGRFGEVWRGKWRGEEVAVKIFSSREERSWFREAEIYQTVMLRHENILGFIAADNKDNGTWTQLWLVSDYHEHGSLFDYLNRYTVTVEGMIKLALSTASGLAHLHMEIVGTQGKPAIAHRDLKSKNILVKKNGTCCIADLGLAVRHDSATDTIDIAPNHRVGTKRYMAPEVLDDSINMKHFESFKRADIYAMGLVFWEIARRCSIGGIHEDYQLPYYDLVPSDPSVEEMRKVVCEQKLRPNIPNRWQSCEALRVMAKIMRECWYANGAARLTALRIKKTLSQLSQQEGIKM

SEQ ID NO: 21020 - protein, 27 aa, Artificial Sequence
  Synthetic polypeptide
GRSEAAAAARERYSVSATSVQKTILLV

SEQ ID NO: 21021 - protein, 16 aa, Artificial Sequence
  Synthetic polypeptide
ATQNTVISAFPSEVCM

SEQ ID NO: 21022 - protein, 200 aa, Artificial Sequence
  Synthetic polypeptide
FLHFHLRCVCNIDCSGYSFNPVCASDGSSYNNPCFVREASCIKQEQIDIRHLGHCTDTDDTSLLGKKDDGLQYRPDVKDASDQREDVYIGNHMPCPENLNGYCIHGKCEFIYSTQKASCRCESGYTGQHCEKTDFSILYVVPSRQKLTHVLIAAIIGAVQIAIIVAIVMCITRKCPKNNRGRRQKQNLGHFTSDTSSRMV

SEQ ID NO: 21023 - protein, 5 aa, Artificial Sequence
  Synthetic polypeptide
GVYVI

SEQ ID NO: 21024 - protein, 26 aa, Artificial Sequence
  Synthetic polypeptide
FLHFHLRYQVHLTRECQTVGTGVYVI

SEQ ID NO: 21025 - protein, 18 aa, Artificial Sequence
  Synthetic polypeptide
GTRFISLGSARQWAQVCM

SEQ ID NO: 21026 - protein, 201 aa, Artificial Sequence
  Synthetic polypeptide
GVPDSGHRCVCNIDCSGYSFNPVCASDGSSYNNPCFVREASCIKQEQIDIRHLGHCTDTDDTSLLGKKDDGLQYRPDVKDASDQREDVYIGNHMPCPENLNGYCIHGKCEFIYSTQKASCRCESGYTGQHCEKTDFSILYVVPSRQKLTHVLIAAIIGAVQIAIIVAIVMCITRKCPKNNRGRRQKQNLGHFTSDTSSRMV

SEQ ID NO: 21027 - protein, 18 aa, Artificial Sequence
  Synthetic polypeptide
FTSSFPRIPLWNCPRKQC

SEQ ID NO: 21028 - protein, 27 aa, Artificial Sequence
  Synthetic polypeptide
GFSTIIYIILPKDSALELSEKAVLKIM

SEQ ID NO: 21029 - protein, 347 aa, Artificial Sequence
  Synthetic polypeptide
QQCPLHEAIMRIQHDNLHHPSQGFRFGTVRESSAEDYVRQSFPEMHEYMRRYNVPATPDGVEYLKNDPEKLDAFIMDKALLDYEVSIDADCKLLTVGKPFAIEGYGIGLPPNSPLTANISELISQYKSHGFMDMLHDKWYRVVPCGKRSFAVTETLQMGIKHFSGLFVLLCIGFGLSILTTIGEHIVYRLLLPRIKNKSKLQYWLHTSQRLHRAINTSFIEEKQQHFKTKRVEKRSNVGPRQLTVWNTSNLSHDNRRKYIFSDEEGQNQLGIRIHQDIPLPPRRRELPALRTTNGKADSLNVSRNSVMQELSELEKQIQVIRQELQLAVSRKTELEEYQRTSRTCES

SEQ ID NO: 21030 - protein, 41 aa, Artificial Sequence
  Synthetic polypeptide
DSAWHIVSSQYHFQRPQWFHQSKRFHHRQLRKQLFHLESST

SEQ ID NO: 21031 - protein, 26 aa, Artificial Sequence
  Synthetic polypeptide
NISCIDCGLTSLLHPQHLGQCLAHSF

SEQ ID NO: 21032 - protein, 20 aa, Artificial Sequence
  Synthetic polypeptide
ESPGLCCIHNSAIIFLRSFG

SEQ ID NO: 21033 - protein, 1558 aa, Artificial Sequence
  Synthetic polypeptide
FWLGNLLPYSDPSVVFVFLSVFAVVTILQCFLISTLFSRANLAAACGGIIYFTLYLPYVLCVAWQDYVGFTLKIFASLLSPVAFGFGCEYFALFEEQGIGVQWDNLFESPVEEDGFNLTTSVSMMLFDTFLYGVMTWYIEAVFPGQYGIPRPWYFPCTKSYWFGEESDEKSHPGSNQKRISEICMEEEPTHLKLGVSIQNLVKVYRDGMKVAVDGLALNFYEGQITSFLGHNGAGKTTTMSILTGLFPPTSGTAYILGKDIRSEMSTIRQNLGVCPQHNVLFDMLTVEEHIWFYARLKGLSEKHVKAEMEQMALDVGLPSSKLKSKTSQLSGGMQRKLSVALAFVGGSKVVILDEPTAGVDPYSRRGIWELLLKYRQGRTIILSTHHMDEADVLGDRIAIISHGKLCCVGSSLFLKNQLGTGYYLTLVKKDVESSLSSCRNSSSTVSYLKKEDSVSQSSSDAGLGSDHESDTLTIDVSAISNLIRKHVSEARLVEDIGHELTYVLPYEAAKEGAFVELFHEIDDRLSDLGISSYGISETTLEEIFLKVAEESGVDAETSDGTLPARRNRRAFGDKQSCLRPFTEDDAADPNDSDIDPESRETDLLSGMDGKGSYQVKGWKLTQQQFVALLWKRLLIARRSRKGFFAQIVLPAVFVCIALVFSLIVPPFGKYPSLELQPWMYNEQYTFVSNDAPEDTGTLELLNALTKDPGFGTRCMEGNPIPDTPCQAGEEEWTTAPVPQTIMDLFQNGNWTMQNPSPACQCSSDKIKKMLPVCPPGAGGLPPPQRKQNTADILQDLTGRNISDYLVKTYVQIIAKSLKNKIWVNEFRYGGFSLGVSNTQALPPSQEVNDAIKQMKKHLKLAKDSSADRFLNSLGRFMTGLDTKNNVKVWFNNKGWHAISSFLNVINNAILRANLQKGENPSHYGITAFNHPLNLTKQQLSEVALMTTSVDVLVSICVIFAMSFVPASFVVFLIQERVSKAKHLQFISGVKPVIYWLSNFVWDMCNYVVPATLVIIIFICFQQKSYVSSTNLPVLALLLLLYGWSITPLMYPASFVFKIPSTAYVVLTSVNLFIGINGSVATFVLELFTDNKLNNINDILKSVFLIFPHFCLGRGLIDMVKNQAMADALERFGENRFVSPLSWDLVGRNLFAMAVEGVVFFLITVLIQYRFFIRPRPVNAKLSPLNDEDEDVRRERQRILDGGGQNDILEIKELTKIYRRKRKPAVDRICVGIPPGECFGLLGVNGAGKSSTFKMLTGDTTVTRGDAFLNKNSILSNIHEVHQNMGYCPQFDAITELLTGREHVEFFALLRGVPEKEVGKVGEWAIRKLGLVKYGEKYAGNYSGGNKRKLSTAMALIGGPPVVFLDEPTTGMDPKARRFLWNCALSVVKEGRSVVLTSHSMEECEALCTRMAIMVNGRFRCLGSVQHLKNRFGDGYTIVVRIAGSNPDLKPVQDFFGLAFPGSVLKEKHRNMLQYQLPSSLSSLARIFSILSQSKKRLHIEDYSVSQTTLDQVFVNFAKDQSDDDHLKDLSLHKNQTVVDVAVLTSFLQDEKVKESYV

SEQ ID NO: 21034 - protein, 27 aa, Artificial Sequence
  Synthetic polypeptide
KALDSVVFITLPLFFCVVLVRKPAALQ

SEQ ID NO: 21035 - protein, 670 aa, Artificial Sequence
  Synthetic polypeptide
AELMKRGAVFALFIAILVLSWYQYMSSKREWKPLEDRSCTDIPWLLLFILFCIGMGFICGFSIATGAAARLVSGYDSYGNICGQKNTKLEAIPNSGMDHTQRKYVFFLDPCNLDLINRKIKSVALCVAACPRQELKTLSDVQKFAEINGSALCSYNLKPSEYTTSPKSSVLCPKLPVPASAPIPFFHRCAPVNISCYAKFAEALITFVSDNSVLHRLISGVMTSKEIILGLCLLSLVLSMILMVIIRYISRVLVWILTILVILGSLGGTGVLWWLYAKQRRSPKETVTPEQLQIAEDNLRALLIYAISATVFTVILFLIMLVMRKRVALTIALFHVAGKVFIHLPLLVFQPFWTFFALVLFWVYWIMTLLFLGTTGSPVQNEQGFVEFKISGPLQYMWWYHVVGLIWISEFILACQQMTVAGAVVTYYFTRDKRNLPFTPILASVNRLIRYHLGTVAKGSFIITLVKIPRMILMYIHSQLKGKENACARCVLKSCICCLWCLEKCLNYLNQNAYTATAINSTNFCTSAKDAFVILVENALRVATINTVGDFMLFLGKVLIVCSTGLAGIMLLNYQQDYTVWVLPLIIVCLFAFLVAHCFLSIYEMVVDVLFLCFAIDTKYNDGSPGREFYMDKVLMEFVENSRKAMKEAGKGGVADSRELKPMASGASSA

SEQ ID NO: 21036 - protein, 665 aa, Artificial Sequence
  Synthetic polypeptide
AELMKRGAVFALFIAILVLSWYQYMSSKREWKPLEDRSCTDIPWLLLFILFCIGMGFICGFSIATGAAARLVSGYDSYGNICGQKNTKLEAIPNSGMDHTQRKYVFFLDPCNLDLINRKIKSVALCVAACPRQELKTLSDVQKFAEINGSALCSYNLKPSEYTTSPKSSVLCPKLPVPASAPIPFFHRCAPVNISCYAKFAEALITFVSDNSVLHRLISGVMTSKEIILGLCLLSLVLSMILMVIIRYISRVLVWILTILVILGSLGGTGVLWWLYAKQRRSPKETVTPEQLQIAEDNLRALLIYAISATVFTVILFLIMLVMRKRVALTIALFHVAGKVFIHLPLLVFQPFWTFFALVLFWVYWIMTLLFLGTTGSPVQNEQGFVEFKISGPLQYMWWYHVVGLIWISEFILACQQMTVAGAVVTYYFTRDKRNLPFTPILASVNRLIRYHLGTVAKGSFIITLVKIPRMILMYIHSQLKGKENACARCVLKSCICCLWCLEKCLNYLNQNAYTATAINSTNFCTSAKDAFVILVENALRVATINTVGDFMLFLGKVLIVCSTGLAGIMLLNYQQDYTVWVLPLIIVCLFAFLVAHCFLSIYEMVVDVLFLCFAIDTKYNDGSPGREFYMDKVLMEFVENSRKAMKEAGKGGVADSRELKPMIK

SEQ ID NO: 21037 - protein, 667 aa, Artificial Sequence
  Synthetic polypeptide
AELMKRGAVFALFIAILVLSWYQYMSSKREWKPLEDRSCTDIPWLLLFILFCIGMGFICGFSIATGAAARLVSGYDSYGNICGQKNTKLEAIPNSGMDHTQRKYVFFLDPCNLDLINRKIKSVALCVAACPRQELKTLSDVQKFAEINGSALCSYNLKPSEYTTSPKSSVLCPKLPVPASAPIPFFHRCAPVNISCYAKFAEALITFVSDNSVLHRLISGVMTSKEIILGLCLLSLVLSMILMVIIRYISRVLVWILTILVILGSLGGTGVLWWLYAKQRRSPKETVTPEQLQIAEDNLRALLIYAISATVFTVILFLIMLVMRKRVALTIALFHVAGKVFIHLPLLVFQPFWTFFALVLFWVYWIMTLLFLGTTGSPVQNEQGFVEFKISGPLQYMWWYHVVGLIWISEFILACQQMTVAGAVVTYYFTRDKRNLPFTPILASVNRLIRYHLGTVAKGSFIITLVKIPRMILMYIHSQLKGKENACARCVLKSCICCLWCLEKCLNYLNQNAYTATAINSTNFCTSAKDAFVILVENALRVATINTVGDFMLFLGKVLIVCSTGLAGIMLLNYQQDYTVWVLPLIIVCLFAFLVAHCFLSIYEMVVDVLFLCFAIDTKYNDGSPGREFYMDKVLMEFVENSRKAMKEAGKGGVADSRELKPMLKKR

SEQ ID NO: 21038 - protein, 17 aa, Artificial Sequence
  Synthetic polypeptide
LVPIHELQTRMEAAGGP

SEQ ID NO: 21039 - protein, 190 aa, Artificial Sequence
  Synthetic polypeptide
LGHKGAFMNGISVLIKEASGSLVRTQKTPLVRNGSLVDTKSVGALILDFPASRTITTLINHKDNTKKSDKTLQAIQRVGQAVNLAVGRFVKVGEAIANENWDLKEEINIACIEAKQAGETIAALTDITNLNHLESDGQITIFTDKTGVIKAARLLLSSVTKVLLLADRVVIKQIITSRNKRLTIYNLRHS

SEQ ID NO: 21040 - protein, 657 aa, Artificial Sequence
  Synthetic polypeptide
LGHKGAFMNGISVLIKEASGSLVRTQKTPLVRNGSLVDTKSVGALILDFPASRTITTLINHKDNTKKSDKTLQAIQRVGQAVNLAVGRFVKVGEAIANENWDLKEEINIACIEAKQAGETIAALTDITNLNHLESDGQITIFTDKTGVIKAARLLLSSVTKVLLLADRVVIKQIITSRNKVLATMERLEKVNSFQEFVQIFSQFGNEMVEFAHLSGDRQNDLKDEKKKAKMAAARAVLEKCTMMLLTASKTCLRHPNCESAHKNKEGVFDRMKVALDKVIEIVTDCKPNGETDISSISIFTGIKEFKMNIEALRENLYFQSKENLSVTLEVILERMEDFTDSAYTSHEHRERILELSTQARMELQQLISVWIQAQSKKTKSIAEELELSILKISHSLNELKKEIISAAETLTLHPSSKIAKENLDVFCEAWESQISDMSTLLREINDVFEGRRGEKYGYLSLPKPMKNNANLKSLKPDKPDSEEQAKIAKLGLKLGLLTSDADCEIEKWEDQENEIVQYGRNMSSMAYSLYLFTRGEGPLKTSQDLIHQLEVFAAEGLKLTSSVQAFSKQLKDDDKLMLLLEINKLIPLCHQLQTVTKTSLQNKVFLKVDKCITKTRSMMALLVQLLSLCYKLLKKLQMENNGWVSVTNKDTMDSKT

SEQ ID NO: 21041 - protein, 741 aa, Artificial Sequence
  Synthetic polypeptide
LGHKGAFMNGISVLIKEASGSLVRTQKTPLVRNGSLVDTKSVGALILDFPASRTITTLINHKDNTKKSDKTLQAIQRVGQAVNLAVGRFVKVGEAIANENWDLKEEINIACIEAKQAGETIAALTDITNLNHLESDGQITIFTDKTGVIKAARLLLSSVTKVLLLADRVVIKQIITSRNKVLATMERLEKVNSFQEFVQIFSQFGNEMVEFAHLSGDRQNDLKDEKKKAKMAAARAVLEKCTMMLLTASKTCLRHPNCESAHKNKEGVFDRMKVALDKVIEIVTDCKPNGETDISSISIFTGIKEFKMNIEALRENLYFQSKENLSVTLEVILERMEDFTDSAYTSHEHRERILELSTQARMELQQLISVWIQAQSKKTKSIAEELELSILKISHSLNELKKELHSTATQLAADLLKYHADHVVLKALKLTGVEGNLEALAEYACKLSEQKEQLVETCRLLRHISGTEPLEITCIHAEETFQVTGQQIISAAETLTLHPSSKIAKENLDVFCEAWESQISDMSTLLREINDVFEGRRGEKYGYLSLPKPMKNNANLKSLKPDKPDSEEQAKIAKLGLKLGLLTSDADCEIEKWEDQENEIVQYGRNMSSMAYSLYLFTRGEGPLKTSQDLIHQLEVFAAEGLKLTSSVQAFSKQLKDDDKLMLLLEINKLIPLCHQLQTVTKTSLQNKVFLKVDKCITKTRSMMALLVQLLSLCYKLLKKLQMENNGWVSVTNKDTMDSKT

SEQ ID NO: 21042 - protein, 725 aa, Artificial Sequence
  Synthetic polypeptide
LGHKGAFMNGISVLIKEASGSLVRTQKTPLVRNGSLVDTKSVGALILDFPASRTITTLINHKDNTKKSDKTLQAIQRVGQAVNLAVGRFVKVGEAIANENWDLKEEINIACIEAKQAGETIAALTDITNLNHLESDGQITIFTDKTGVIKAARLLLSSVTKVLLLADRVVIKQIITSRNKVLATMERLEKVNSFQEFVQIFSQFGNEMVEFAHLSGDRQNDLKDEKKKAKMAAARAVLEKCTMMLLTASKTCLRHPNCESAHKNKEGVFDRMKVALDKVIEIVTDCKPNGETDISSISIFTGIKEFKMNIEALRENLYFQSKENLSVTLEVILERMEDFTDSAYTSHEHRERILELSTQARMELQQLISVWIQAQSKKTKSIAEELELSILKISHSLNELKKELHSTATQLAADLLKYHADHVVLKALKLTGVEGNLEALAEYACKLSEQKEQLVETCRLLRHISGTEPLEITCIHAEETFQVTGQQIISAAETLTLHPSSKIAKENLDVFCEAWESQISDMSTLLREINDVFEGRRGEKYGYLSLPKPMKNNANLKSLKPDKPDSEEQAKIAKLGLKLGLLTSDADCEIEKWEDQENEIVQYGRNMSSMAYSLYLFTRGEGPLKTSQDLIHQLEVFAAEGLKLTSSVQAFSKQLKDDDKLMLLLEINKLIPLCHQLQTVTKTSLQNKVFLKVDKCITKTRSMMALLVQLLSLCYKLLKKSETRY

SEQ ID NO: 21043 - protein, 90 aa, Artificial Sequence
  Synthetic polypeptide
LWPDCWHSPKIYMLELNPHNDGIKSWGLWEVIRSQGSLHEWDQCSYKRGFREPCEDTEDTTCEEWVLSRHQICWCLDPGLPSLQNYHHAY

SEQ ID NO: 21044 - protein, 32 aa, Artificial Sequence
  Synthetic polypeptide
SWTSQPPELSPRLLIIKIIPKSLIKLCKQFSV

SEQ ID NO: 21045 - protein, 11 aa, Artificial Sequence
  Synthetic polypeptide
KSRIFSCPLIC

SEQ ID NO: 21046 - protein, 325 aa, Artificial Sequence
  Synthetic polypeptide
PTFENQESSAVRSFADFKSEDELNQLFPEAIFPMCPEGGDTLEGSMAQLKKGLESGTVLIQFEQLYRKKPGLAITFAKLPQNLDKNRYKDVLPYDTTRVLLQGNEDYINASYVNMEIPAANLVNKYIATQGPLPHTCAQFWQVVWDQKLSLIVMLTTLTERGRTKCHQYWPDPPDVMNHGGFHIQCQSEDCTIAYVSREMLVTNTQTGEEHTVTHLQYVAWPDHGVPDDSSDFLEFVNYVRSLRVDSEPVLVHCSAGIGRTGVLVTMETAMCLTERNLPIYPLDIVRKMRDQRAMMVQTSSQYKFVCEAILRVYEEGLVQMLDPS

SEQ ID NO: 21047 - protein, 25 aa, Artificial Sequence
  Synthetic polypeptide
VCSQHLKIKNLQLSAHLLTSSLKMN

SEQ ID NO: 21048 - protein, 35 aa, Artificial Sequence
  Synthetic polypeptide
ACEEFIREQSGTKLPDPEVIQFCVSIFKCSRLLLT

SEQ ID NO: 21049 - protein, 508 aa, Artificial Sequence
  Synthetic polypeptide
ALSSRTSCRGEMFSDCTVSYGSHWPHMASEHVKSLSENNPAQSYLTQKSSSSVSPSSNAPGSCSPDGVDQQLLDDFHRVTKGGSTEDASQYYCDKNDNGDSYLVLIRITPDEDGKFGFNLKGGVDQKMPLVVSRINPESPADTCIPKLNEGDQIVLINGRDISEHTHDQVVMFIKASRESHSRELALVIRRRAVRSFADFKSEDELNQLFPEAIFPMCPEGGDTLEGSMAQLKKGLESGTVLIQFEQLYRKKPGLAITFAKLPQNLDKNRYKDVLPYDTTRVLLQGNEDYINASYVNMEIPAANLVNKYIATQGPLPHTCAQFWQVVWDQKLSLIVMLTTLTERGRTKCHQYWPDPPDVMNHGGFHIQCQSEDCTIAYVSREMLVTNTQTGEEHTVTHLQYVAWPDHGVPDDSSDFLEFVNYVRSLRVDSEPVLVHCSAGIGRTGVLVTMETAMCLTERNLPIYPLDIVRKMRDQRAMMVQTSSQYKFVCEAILRVYEEGLVQMLDPS

SEQ ID NO: 21050 - protein, 12 aa, Artificial Sequence
  Synthetic polypeptide
RVYPRTIRHKAT

SEQ ID NO: 21051 - protein, 19 aa, Artificial Sequence
  Synthetic polypeptide
FLHFHLRSVCCREANVPAL

SEQ ID NO: 21052 - protein, 74 aa, Artificial Sequence
  Synthetic polypeptide
GRSQDGRIGTAPVYSSQRERRRRRVISAFPSEECVLSGSQCACSLNTWPMVTSMSSSAACPLTPCAASVTVTCL

SEQ ID NO: 21053 - protein, 227 aa, Artificial Sequence
  Synthetic polypeptide
GVCAVGKPMCLLFEYMAYGDLNEFLRSMSPHTVCSLSHSDLSMRAQVSSPGPPPLSCAEQLCIARQVAAGMAYLSERKFVHRDLATRNCLVGENMVVKIADFGLSRNIYSADYYKANENDAIPIRWMPPESIFYNRYTTESDVWAYGVVLWEIFSYGLQPYYGMAHEEVIYYVRDGNILSCPENCPVELYNLMRLCWSKLPADRPSFTSIHRILERMCERAEGTVSV

SEQ ID NO: 21054 - protein, 22 aa, Artificial Sequence
  Synthetic polypeptide
IRSSCGLCQQSVFYKLSVHSHE

SEQ ID NO: 21055 - protein, 38 aa, Artificial Sequence; identical to SEQ ID NO: 5915
  Synthetic polypeptide

SEQ ID NO: 21056 - protein, 202 aa, Artificial Sequence; identical to SEQ ID NO: 2859
  Synthetic polypeptide

SEQ ID NO: 21057 - protein, 384 aa, Artificial Sequence; identical to SEQ ID NO: 2273
  Synthetic polypeptide

SEQ ID NO: 21058 - protein, 184 aa, Artificial Sequence; identical to SEQ ID NO: 2952
  Synthetic polypeptide

SEQ ID NO: 21059 - protein, 366 aa, Artificial Sequence; identical to SEQ ID NO: 2310
  Synthetic polypeptide

SEQ ID NO: 21060 - protein, 44 aa, Artificial Sequence; identical to SEQ ID NO: 5478
  Synthetic polypeptide

SEQ ID NO: 21061 - protein, 10 aa, Artificial Sequence
  Synthetic polypeptide
SLSSSASSQP

SEQ ID NO: 21062 - protein, 53 aa, Artificial Sequence
  Synthetic polypeptide
AGGPDRAPAGDSVSQAAAELQQYCMQNACKDALLVGVPAGSNPFREPRSCALL

SEQ ID NO: 21063 - protein, 41 aa, Artificial Sequence
  Synthetic polypeptide
GRRPGPGASGGLGLSGSCRASTVLYAECLQGCPAGGCSSWK

SEQ ID NO: 21064 - protein, 53 aa, Artificial Sequence
  Synthetic polypeptide
PAARTGRQRGTRSLRQLQSFNSTVCRMPARMPCWWVFQLEVTPSGSLDPVLYS

SEQ ID NO: 21065 - protein, 78 aa, Artificial Sequence
  Synthetic polypeptide
MYNSGCLRRRQMRRGRWPWRKGRGLVPRIPHPARSPLLARSFLQDKTFHPTRTPLLGRNPLPAKNHCPAKTQLPLKDP

SEQ ID NO: 21066 - protein, 85 aa, Artificial Sequence
  Synthetic polypeptide
MYNSGCLRRRQMRRGRWPWRKGRGLVPRIPHPARSPLLARSFLQDKTFHPTRTPLLGRNPLPAKNHCPAKTQLPLKDPLQAQMLR

SEQ ID NO: 21067 - protein, 176 aa, Artificial Sequence
  Synthetic polypeptide
MYNSGCLRRRQMRRGRWPWRKGRGLVPRIPHPARSPLLARSFLQDKTFHPTRTPLLGRNPLPAKNHCPAKTQLPLKDPLQAQMLRPARMCHHARGLRVASHCVCRTRCGAGRTARAACCRSPEGPALPPTPPCTAQTVRAPPPPGACLRPAPSRKSWAAMVAPCTTFPSSSQDTGR

SEQ ID NO: 21068 - protein, 159 aa, Artificial Sequence
  Synthetic polypeptide
MYNSGCLRRRQMRRGRWPWRKGRGLVPRIPHPARSPLLARSFLQDKTFHPTRTPLLGRNPLPAKNHCPAKTQLPLKDPLQAQMLRPARMCHHARNPLQPKTSHPARTYLLVKNPCLTRTLYSPKTSLPSRNPPPGTFHPVKICLLARSPCQPRPLLRTP

SEQ ID NO: 21069 - protein, 7 aa, Artificial Sequence
  Synthetic polypeptide
SCTIVDV

SEQ ID NO: 21070 - protein, 75 aa, Artificial Sequence
  Synthetic polypeptide
WMFETEADEKREMALEEGKGPGAEDSPPSKEPSPGQELPPGQDLPPNKDSPSGQEPAPSQEPLSSKDSATSEGSP

SEQ ID NO: 21071 - protein, 81 aa, Artificial Sequence
  Synthetic polypeptide
WMFETEADEKREMALEEGKGPGAEDSPPSKEPSPGQELPPGQDLPPNKDSPSGQEPAPSQEPLSSKDSATSEGSPPGPDAP

SEQ ID NO: 21072 - protein, 520 aa, Artificial Sequence
  Synthetic polypeptide
WMFETEADEKREMALEEGKGPGAEDSPPSKEPSPGQELPPGQDLPPNKDSPSGQEPAPSQEPLSSKDSATSEGSPPGPDAPPSKDVPPCQEPPPAQDLSPCQDLPAGQEPLPHQDPLLTKDLPAIQESPTRDLPPCQDLPPSQVSLPAKALTEDTMSSGDLLAATGDPPAAPRPAFVIPEVRLDSTYSQKAGAEQGCSGDEEDAEEAEEVEEGEEGEEDEDEDTSDDNYGERSEAKRSSMIETGQGAEGGLSLRVQNSLRRRTHSEGSLLQEPRGPCFASDTTLHCSDGEGAASTWGMPSPSTLKKELGRNGGSMHHLSLFFTGHRKMSGADTVGDDDEASRKRKSKNLAKDMKNKLGIFRRRNESPGAPPAGKADKMMKSFKPTSEEALKWGESLEKLLVHKYGLAVFQAFLRTEFSEENLEFWLACEDFKKVKSQSKMASKAKKIFAEYIAIQACKEVNLDSYTREHTKDNLQSVTRGCFDLAQKRIFGLMEKDSYPRFLRSDLYLDLINQKKMSPPL

SEQ ID NO: 21073 - protein, 248 aa, Artificial Sequence
  Synthetic polypeptide
WMFETEADEKREMALEEGKGPGAEDSPPSKEPSPGQELPPGQDLPPNKDSPSGQEPAPSQEPLSSKDSATSEGSPPGPDAPPSKDVPPCQGAEGGLSLRVQNSLRRRTHSEGSLLQEPRGPCFASDTTLHCSDGEGAASTWGMPSPSTLKKELGRNGGSMHHLSLFFTGHRKMSGADTVGDDDEASRKRKSKNLAKDMKNKLGIFRRRNESPGAPPAGKADKMMKSFKPTSEEALKWGESLEKLLVHK

SEQ ID NO: 21074 - protein, 14 aa, Artificial Sequence
  Synthetic polypeptide
GSHTVVCSGITKGR

SEQ ID NO: 21075 - protein, 18 aa, Artificial Sequence
  Synthetic polypeptide
VVLTLWCAPESPRGDERG

SEQ ID NO: 21076 - protein, 90 aa, Artificial Sequence
  Synthetic polypeptide
WFSHCGVLRNHQGEMSGADTVGDDDEASRKRKSKNLAKDMKNKLGIFRRRNESPGAPPAGKADKMMKSFKPTSEEALKWGESLEKLLVHK

SEQ ID NO: 21077 - protein, 207 aa, Artificial Sequence
  Synthetic polypeptide
WFSHCGVLRNHQGEMSGADTVGDDDEASRKRKSKNLAKDMKNKLGIFRRRNESPGAPPAGKADKMMKSFKPTSEEALKWGESLEKLLVHKYGLAVFQAFLRTEFSEENLEFWLACEDFKKVKSQSKMASKAKKIFAEYIAIQACKEVNLDSYTREHTKDNLQSVTRGCFDLAQKRIFGLMEKDSYPRFLRSDLYLDLINQKKMSPPL

SEQ ID NO: 21078 - protein, 36 aa, Artificial Sequence
  Synthetic polypeptide
KQCSGPIPGWLTPHIWGWEPAVSHLHKPSSSHSSLR

SEQ ID NO: 21079 - protein, 23 aa, Artificial Sequence
  Synthetic polypeptide
RLISGDGSQLSVIFTSPPVLTPL

SEQ ID NO: 21080 - protein, 480 aa, Artificial Sequence
  Synthetic polypeptide
VASNAECTESPGLLLKAVLGPHSRLVNASYLGMGASCQSSSQALQFSLLSEVRGTISPQDLERFDHLVLRREIESMKARQPPGPGAGDTYSMVSYSDTGSSTGSHGTSTTVSSARNTLDLEETGEAVQGNINALPDVSVDDVRSTSQGLSSFKPLPRPPPLAQGNDLPLGQPRKLGREDLQPPSSMPSCSGTVFSAPQNRSPPAGTAPTPGTSSAQDLPSSPIYASVSPANPSSKRPLDAHLALVNQHPIGPFPRVQSPPHLKSPSAEATVAGGCLLPPSPSGHPDQTGTNQHFVMVEVHRPDSEPDVNEVRALPQTRTASTLSHLSDSGQTLSEDSGVDAGEAEASAPGRGRQSVSTKSRSSKELPRNERPTDGANKPPGLLEPTSTLVRVKKSAATLGIAIEGGANTRQPLPRIVTIQRGGSAHNCGQLKVGHVILEVNGLTLRGKEHREAARIIAEAFKTKDRDYIDFLVTEFNVML

SEQ ID NO: 21081 - protein, 587 aa, Artificial Sequence
  Synthetic polypeptide
DVGDQILEVNGRSFLNILHDEAVRLLKSSRHLILTVKDVGRLPRARTTVDETKWIASSRIRETMANSAGFLGDLTTEGINKPGFYKGPAGSQVTLSSLGNQTRVLLEEQARHLLNEQEHATMAYYLDEYRGGSVSVEALVMALFKLLNTHAKFSLLSEVRGTISPQDLERFDHLVLRREIESMKARQPPGPGAGDTYSMVSYSDTGSSTGSHGTSTTVSSARNTLDLEETGEAVQGNINALPDVSVDDVRSTSQGLSSFKPLPRPPPLAQGNDLPLGQPRKLGREDLQPPSSMPSCSGTVFSAPQNRSPPAGTAPTPGTSSAQDLPSSPIYASVSPANPSSKRPLDAHLALVNQHPIGPFPRVQSPPHLKSPSAEATVAGGCLLPPSPSGHPDQTGTNQHFVMVEVHRPDSEPDVNEVRALPQTRTASTLSHLSDSGQTLSEDSGVDAGEAEASAPGRGRQSVSTKSRSSKELPRNERPTDGANKPPGLLEPTSTLVRVKKSAATLGIAIEGGANTRQPLPRIVTIQRGGSAHNCGQLKVGHVILEVNGLTLRGKEHREAARIIAEAFKTKDRDYIDFLVTEFNVML

SEQ ID NO: 21082 - protein, 16 aa, Artificial Sequence
  Synthetic polypeptide
SWTSNLQNCEMLGTRF

SEQ ID NO: 21083 - protein, 41 aa, Artificial Sequence
  Synthetic polypeptide
TCWRLDLGLPTSKTVRCWGPDSRSEWAELSQHPTRRGCQAA

SEQ ID NO: 21084 - protein, 35 aa, Artificial Sequence
  Synthetic polypeptide
EGTVYEPGSGPSPDTEPAGVLILDFQPPKLLGTRF

SEQ ID NO: 21085 - protein, 33 aa, Artificial Sequence
  Synthetic polypeptide
SWTSNLQNCWGPDSRSEWAELSQHPTRRGCQAA

SEQ ID NO: 21086 - protein, 600 aa, Artificial Sequence
  Synthetic polypeptide
TCWRLDLGLPTSKTVGDQILEVNGRSFLNILHDEAVRLLKSSRHLILTVKDVGRLPRARTTVDETKWIASSRIRETMANSAGFLGDLTTEGINKPGFYKGPAGSQVTLSSLGNQTRVLLEEQARHLLNEQEHATMAYYLDEYRGGSVSVEALVMALFKLLNTHAKFSLLSEVRGTISPQDLERFDHLVLRREIESMKARQPPGPGAGDTYSMVSYSDTGSSTGSHGTSTTVSSARNTLDLEETGEAVQGNINALPDVSVDDVRSTSQGLSSFKPLPRPPPLAQGNDLPLGQPRKLGREDLQPPSSMPSCSGTVFSAPQNRSPPAGTAPTPGTSSAQDLPSSPIYASVSPANPSSKRPLDAHLALVNQHPIGPFPRVQSPPHLKSPSAEATVAGGCLLPPSPSGHPDQTGTNQHFVMVEVHRPDSEPDVNEVRALPQTRTASTLSHLSDSGQTLSEDSGVDAGEAEASAPGRGRQSVSTKSRSSKELPRNERPTDGANKPPGLLEPTSTLVRVKKSAATLGIAIEGGANTRQPLPRIVTIQRGGSAHNCGQLKVGHVILEVNGLTLRGKEHREAARIIAEAFKTKDRDYIDFLVTEFNVML

SEQ ID NO: 21087 - protein, 261 aa, Artificial Sequence
  Synthetic polypeptide
DPRGLGVAATLDQRWDAGAHLLPSLAGLSFSPVKRGEVSICLLGSWRFCEVTCVVVHVTHGPRSHLMPRLKESRSHESLLSPSSAVEALDLSMEEEVVIKPVHSSILGQDYCFEVTTSSGSKCFSCRSAAERDKWMENLRRAVHPNKDNSRRVEHILKLWVIEAKDLPAKKKYLCELCLDDVLYARTTGKLKTDNVFWGEHFEFHNLPPLRTVTVHLYRETDKKKKKERNSYLGLVSLPAASVAGRQFVEKWYPVVTPNPK

SEQ ID NO: 21088 - protein, 1131 aa, Artificial Sequence
  Synthetic polypeptide
DPRGLGVAATLDQRWDAGAHLLPSLAGLSFSPVKRGEVSICLLGSWRFCEVTCVVVHVTHGPRSHLMPRLKESRSHESLLSPSSAVEALDLSMEEEVVIKPVHSSILGQDYCFEVTTSSGSKCFSCRSAAERDKWMENLRRAVHPNKDNSRRVEHILKLWVIEAKDLPAKKKYLCELCLDDVLYARTTGKLKTDNVFWGEHFEFHNLPPLRTVTVHLYRETDKKKKKERNSYLGLVSLPAASVAGRQFVEKWYPVVTPNPKGGKGPGPMIRIKARYQTITILPMEMYKEFAEHITNHYLGLCAALEPILSAKTKEEMASALVHILQSTGKVKDFLTDLMMSEVDRCGDNEHLIFRENTLATKAIEEYLKLVGQKYLQDALGEFIKALYESDENCEVDPSKCSAADLPEHQGNLKMCCELAFCKIINSYCVFPRELKEVFASWRQECSSRGRPDISERLISASLFLRFLCPAIMSPSLFNLLQEYPDDRTARTLTLIAKVTQNLANFAKFGSKEEYMSFMNQFLEHEWTNMQRFLLEISNPETLSNTAGFEGYIDLGRELSSLHSLLWEAVSQLEQSIVSKLGPLPRILRDVHTALSTPGSGQLPGTNDLASTPGSGSSSISAGLQKMVIENDLSGLIDFTRLPSPTPENKDLFFVTRSSGVQPSPARSSSYSEANEPDLQMANGGKSLSMVDLQDARTLDGEAGSPAGPDVLPTDGQAAAAQLVAGWPARATPVNLAGLATVRRAGQTPTTPGTSEGAPGRPQLLAPLSFQNPVYQMAAGLPLSPRGLGDSGSEGHSSLSSHSNSEELAAAAKLGSFSTAAEELARRPGELARRQMSLTEKGGQPTVPRQNSAGPQRRIDQPPPPPPPPPPAPRGRTPPNLLSTLQYPRPSSGTLASASPDWVGPSTRLRQQSSSSKGDSPELKPRAVHKQGPSPVSPNALDRTAAWLLTMNAQLLEDEGLGPDPPHRDRLRSKDELSQAEKDLAVLQDKLRISTKKLEEYETLFKCQEETTQKLVLEYQARLEEGEERLRRQQEDKDIQMKGIISRLMSVEEELKKDHAEMQAAVDSKQKIIDAQEKRIASLDAANARLMSALTQLKERYSMQARNGISPTNPTKLQITENGEFRNSSNC

SEQ ID NO: 21089 - protein, 1102 aa, Artificial Sequence
  Synthetic polypeptide
DPRGLGVAATLDQRWDAGAHLLPSLAGLSFSPVKRGEVSICLLGSWRFCEVTCVVVHVTHGPRSHLMPRLKESRSHESLLSPSSAVEALDLSMEEEVVIKPVHSSILGQDYCFEVTTSSGSKCFSCRSAAERDKWMENLRRAVHPNKDNSRRVEHILKLWVIEAKDLPAKKKYLCELCLDDVLYARTTGKLKTDNVFWGEHFEFHNLPPLRTVTVHLYRETDKKKKKERNSYLGLVSLPAASVAGRQFVEKWYPVVTPNPKGGKGPGPMIRIKARYQTITILPMEMYKEFAEHITNHYLGLCAALEPILSAKTKEEMASALVHILQSTGKVKDFLTDLMMSEVDRCGDNEHLIFRENTLATKAIEEYLKLVGQKYLQDALGEFIKALYESDENCEVDPSKCSAADLPEHQGNLKMCCELAFCKIINSYCVFPRELKEVFASWRQECSSRGRPDISERLISASLFLRFLCPAIMSPSLFNLLQEYPDDRTARTLTLIAKVTQNLANFAKFGSKEEYMSFMNQFLEHEWTNMQRFLLEISNPETLSNTAGFEGYIDLGRELSSLHSLLWEAVSQLEQSIVSKLGPLPRILRDVHTALSTPGSGQLPGTNDLASTPGSGSSSISAGLQKMVIENDLSGLIDFTRLPSPTPENKDLFFVTRSSGVQPSPARSSSYSEANEPDLQMANGGKSLSMVDLQDARTLDGEAGSPAGPDVLPTDGQAAAAQLVAGWPARATPVNLAGLATVRRAGQTPTTPGTSEGAPGRPQLLAPLSFQNPVYQMAAGLPLSPRGLGDSGSEGHSSLSSHSNSEELAAAAKLGSFSTAAEELARRPGELARRQMSLTEKGGQPTVPRQNSAGPQRRIDQPPPPPPPPPPAPRGRTPPNLLSTLQYPRPSSGTLASASPDWVGPSTRLRQQSSSSKGDSPELKPRAVHKQGPSPVSPNALDRTAAWLLTMNAQLLEDEGLGPDPPHRDRLRSKDELSQAEKDLAVLQDKLRISTKKLEEYETLFKCQEETTQKLVLEYQARLEEGEERLRRQQEDKDIQMKGIISRLMSVEEELKKDHAEMQAAVDSKQKIIDAQEKRIASLDAANARLMSALTQLKESMH

SEQ ID NO: 21090 - protein, 80 aa, Artificial Sequence
  Synthetic polypeptide
GDLCGGSCDAWPKVPSDAEAEGVSLPRVPAQPQQCGGGAGPQHGGRGGHQARAQQHPWPGLLLRGDDVIRKQVLFLPVCS

SEQ ID NO: 21091 - protein, 7 aa, Artificial Sequence
  Synthetic polypeptide
RMAQGPI

SEQ ID NO: 21092 - protein, 25 aa, Artificial Sequence
  Synthetic polypeptide
GSRSHRLPLLLRAGFPGPTLRAGHR

SEQ ID NO: 21093 - protein, 76 aa, Artificial Sequence
  Synthetic polypeptide
PPQQEASWRASKHRVQQETIRVQIPPASAATACRVSRAHAASWTSMSVHPGRATMGPPAATWPIATSAIAPLAMQA

SEQ ID NO: 21094 - protein, 1221 aa, Artificial Sequence
  Synthetic polypeptide
STPTRGQLESKQTSSAAGDYKGPDPTGFRCYCVPGFQGPRCELDIDECASRPCHHGATCRNLADRYECHCPLGYAGVTCEMEVDECASAPCLHGGSCLDGVGSFRCVCAPGYGGTRCQLDLDECQSQPCAHGGTCHDLVNGFRCDCAGTGYEGTHCEREVLECASAPCEHNASCLEGLGSFRCLCWPGYSGELCEVDEDECASSPCQHGGRCLQRSDPALYGGVQAAFPGAFSFRHAAGFLCHCPPGFEGADCGVEVDECASRPCLNGGHCQDLPNGFQCHCPDGYAGPTCEEDVDECLSDPCLHGGTCSDTVAGYICRCPETWGGRDCSVQLTGCQGHTCPLAATCIPIFESGVHSYVCHCPPGTHGPFCGQNTTFSVMAGSPIQASVPAGGPLGLALRFRTTLPAGTLATRNDTKESLELALVAATLQATLWSYSTTVLVLRLPDLALNDGHWHQVEVVLHLATLELRLWHEGCPARLCVASGPVALASTASATPLPAGISSAQLGDATFAGCLQDVRVDGHLLLPEDLGENVLLGCERREQCRPLPCVHGGSCVDLWTHFRCDCARPHRGPTCADEIPAATFGLGGAPSSASFLLQELPGPNLTVSFLLRTRESAGLLLQFANDSAAGLTVFLSEGRIRAEVPGSPAVVLPGRWDDGLRHLVMLSFGPDQLQDLGQHVHVGGRLLAADSQPWGGPFRGCLQDLRLDGCHLPFFPLPLDNSSQPSELGGRQSWNLTAGCVSEDMCSPDPCFNGGTCLVTWNDFHCTCPANFTGPTCAQQLWCPGQPCLPPATCEEVPDGFVCVAEATFREGPPAAFSGHNASSGRLLGGLSLAFRTRDSEAWLLRAAAGALEGVWLAVRNGSLAGGVRGGHGLPGAVLPIPGPRVADGAWHRVRLAMERPAATTSRWLLWLDGAATPVALRGLASDLGFLQGPGAVRILLAENFTGCLGRVALGGLPLPLARPRPGAAPGAREHFASWPGTPAPILGCRGAPVCAPSPCLHDGACRDLFDAFACACGPGWEGPRCEAHVDPCHSAPCARGRCHTHPDGRFECRCPPGFGGPRCRLPVPSKECSLNVTCLDGSPCEGGSPAANCSCLEGLAGQRCQVPTLPCEANPCLNGGTCRAAGGVSECICNARFSGQFCEVAKGLPLPLPFPLLEVAVPAACACLLLLLLGLLSGILAARKRRQSEGTYSPSQQEVAGARLEMDSVLKVPPEERLI

SEQ ID NO: 21095 - protein, 1112 aa, Artificial Sequence
  Synthetic polypeptide
STPTRGQLESKQTSSAAGDYKGPDPTGFRCYCVPGFQGPRCELDIDECASRPCHHGATCRNLADRYECHCPLGYAGVTCEMEVDECASAPCLHGGSCLDGVGSFRCVCAPGYGGTRCQLDLDECQSQPCAHGGTCHDLVNGFRCDCAGTGYEGTHCEREVLECASAPCEHNASCLEGLGSFRCLCWPGYSGELCEVDEDECASSPCQHGGRCLQRSDPALYGGVQAAFPGAFSFRHAAGFLCHCPPGFEGADCGVEVDECASRPCLNGGHCQDLPNGFQCHCPDGYAGPTCEEDVDECLSDPCLHGGTCSDTVAGYICRCPETWGGRDCSVQLTGCQGHTCPLAATCIPIFESGVHSYVCHCPPGTHGPFCGQNTTFSVMAGSPIQASVPAGGPLGLALRFRTTLPAGTLATRNDTKESLELALVAATLQATLWSYSTTVLVLRLPDLALNDGHWHQVEVVLHLATLELRLWHEGCPARLCVASGPVALASTASATPLPAGISSAQLGDATFAGCLQDVRVDGHLLLPEDLGENVLLGCERREQCRPLPCVHGGSCVDLWTHFRCDCARPHRGPTCADEIPAATFGLGGAPSSASFLLQELPGPNLTVSFLLRTRESAGLLLQFANDSAAGLTVFLSEGRIRAEVPGSPAVVLPGRWDDGLRHLVMLSFGPDQLQDLGQHVHVGGRLLAADSQPWGGPFRGCLQDLRLDGCHLPFFPLPLDNSSQPSELGGRQSWNLTAGCVSEDMCSPDPCFNGGTCLVTWNDFHCTCPANFTGPTCAQQLWCPGQPCLPPATCEEVPDGFVCVAEATFREGPPAAFSGHNASSGRLLGGLSLAFRTRDSEAWLLRAAAGALEGVWLAVRNGSLAGGVRGGHGLPGAVLPIPGPRVADGAWHRVRLAMERPAATTSRWLLWLDGAATPVALRGLASDLGFLQGPGAVRILLAENFTGCLGRVALGGLPLPLARPRPGAAPGAREHFASWPGTPAPILGCRGAPVCAPSPCLHDGACRDLFDAFACACGPGWEGPRCEAHVDPCHSAPCARGRCHTHPDGRFECRCPPGFGGPRCRWDGWAGGWAANAPWGYGGAEKSARSVDESLPFPGPHVLICDMRRTV

SEQ ID NO: 21096 - protein, 485 aa, Artificial Sequence
  Synthetic polypeptide
HRPQPYRTLRESDSAEGDEAESPEQQVRKSTGPVPAPPDRAASIDLLEDVFSNLDMEAALQPLGQAKSLEDLRAPKDLREQPGTFDYQRLDLGGSERSRGVTVALKLTHPYNKLWSLGQDDMAIPSKPPAASPEKPSALLGNSLALPRRPQNRDSILNPSDKEEVPTPTLGSITIPRPQGRKTPELGIVPPPPIPRPAKLQAAGAALGDVSERLQTDRDRRAALSPGLLPGVVPQGPTELLQPLSPGPGAAGTSSDALLALLDPLSTAWSGSTLPSRPATPNVATPFTPQFSFPPAGTPTPFPQPPLNPFVPSMPAAPPTLPLVSTPAGPFGAPPASLGPAFASGLLLSSAGFCAPHRSQPNLSALSMPNLFGQMPMGTHTSPLQPLGPPAVAPSRIRTLPLARSSARAAETKQGLALRPGDPPLLPPRPPQGLEPTLQPSAPQQARDPFEDLLQKTKQDVSPSPALAPAPDSVEQLRKQWETFE

SEQ ID NO: 21097 - protein, 86 aa, Artificial Sequence
  Synthetic polypeptide
MKPLKLGFHFHLLRVLCDIGRSRIGHSGSQTARKATRQRVQSSKCGSPQALSQLPLTGLPASTFWKTSSATWTWRPHCSHWARPRA

SEQ ID NO: 21098 - protein, 28 aa, Artificial Sequence
  Synthetic polypeptide
LSGYVTLYRRSRSLSVRKPSCPTTAPEP

SEQ ID NO: 21099 - protein, 197 aa, Artificial Sequence
  Synthetic polypeptide
NIFWWEEPWTEDKPGFNPTPVTFWLCDPVQEEPITFCEEAFVSHYRSGAMRQFLQNATQLQLFKQFIDGRLDLLNSGEGFSDVFEEEINMGEYAGSDKLYHQWLSTVRKGSGAILNTVKTKANPAMKTVYKFAKDHAKMGIKEVKNRLKQKDIAENGCAPTPEEQLPKTAPSPLVEAKDPKLREDRRPITVHFGQAL

SEQ ID NO: 21100 - protein, 751 aa, Artificial Sequence
  Synthetic polypeptide
NIFWWEEPWTEDKPGFNPTPVTFWLCDPVQEEPITFCEEAFVSHYRSGAMRQFLQNATQLQLFKQFIDGRLDLLNSGEGFSDVFEEEINMGEYAGSDKLYHQWLSTVRKGSGAILNTVKTKANPAMKTVYKFAKDHAKMGIKEVKNRLKQKDIAENGCAPTPEEQLPKTAPSPLVEAKDPKLREDRRPITVHFGQVRPPRPHVVKRPKSNIAVEGRRTSVPSPEHLVKPLRHYAVFLSEDSSDDECQREEGPSSGFTESFFFSAPFEWPQPYRTLRESDSAEGDEAESPEQQVRKSTGPVPAPPDRAASIDLLEDVFSNLDMEAALQPLGQAKSLEDLRAPKDLREQPGTFDYQRLDLGGSERSRGVTVALKLTHPYNKLWSLGQDDMAIPSKPPAASPEKPSALLGNSLALPRRPQNRDSILNPSDKEEVPTPTLGSITIPRPQGRKTPELGIVPPPPIPRPAKLQAAGAALGDVSERLQTDRDRRAALSPGLLPGVVPQGPTELLQPLSPGPGAAGTSSDALLALLDPLSTAWSGSTLPSRPATPNVATPFTPQFSFPPAGTPTPFPQPPLNPFVPSMPAAPPTLPLVSTPAGPFGAPPASLGPAFASGLLLSSAGFCAPHRSQPNLSALSMPNLFGQMPMGTHTSPLQPLGPPAVAPSRIRTLPLARSSARAAETKQGLALRPGDPPLLPPRPPQGLEPTLQPSAPQQARDPFEDLLQKTKQDVSPSPALAPAPDSVEQLRKQWETFE

SEQ ID NO: 21101 - protein, 258 aa, Artificial Sequence
  Synthetic polypeptide
NIFWWEEPWTEDKPGFNPTPVTFWLCDPVQEEPITFCEEAFVSHYRSGAMRQFLQNATQLQLFKQFIDGRLDLLNSGEGFSDVFEEEINMGEYAGSDKLYHQWLSTVRKGSGAILNTVKTKANPAMKTVYKFAKDHAKMGIKEVKNRLKQKDIAENGCAPTPEEQLPKTAPSPLVEAKDPKLREDRRPITVHFGQVRPPRPHVVKRPKSNIAVEGRRTSVPSPEQNTIATPATLHILQKSITHFAAKFPTRGWTSSSH

SEQ ID NO: 21102 - protein, 708 aa, Artificial Sequence
  Synthetic polypeptide
NIFWWEEPWTEDKPGFNPTPVTFWLCDPVQEEPITFCEEAFVSHYRSGAMRQFLQNATQLQLFKQFIDGRLDLLNSGEGFSDVFEEEINMGEYAGSDKLYHQWLSTVRKGSGAILNTVKTKANPAMKTVYKFAKDHAKMGIKEVKNRLKQKDIAENGCAPTPEEQLPKTAPSPLVEAKDPKLREDRRPITVHFGQVRPPRPHVVKRPKSNIAVEGRRTSVPSPEQPQPYRTLRESDSAEGDEAESPEQQVRKSTGPVPAPPDRAASIDLLEDVFSNLDMEAALQPLGQAKSLEDLRAPKDLREQPGTFDYQRLDLGGSERSRGVTVALKLTHPYNKLWSLGQDDMAIPSKPPAASPEKPSALLGNSLALPRRPQNRDSILNPSDKEEVPTPTLGSITIPRPQGRKTPELGIVPPPPIPRPAKLQAAGAALGDVSERLQTDRDRRAALSPGLLPGVVPQGPTELLQPLSPGPGAAGTSSDALLALLDPLSTAWSGSTLPSRPATPNVATPFTPQFSFPPAGTPTPFPQPPLNPFVPSMPAAPPTLPLVSTPAGPFGAPPASLGPAFASGLLLSSAGFCAPHRSQPNLSALSMPNLFGQMPMGTHTSPLQPLGPPAVAPSRIRTLPLARSSARAAETKQGLALRPGDPPLLPPRPPQGLEPTLQPSAPQQARDPFEDLLQKTKQDVSPSPALAPAPDSVEQLRKQWETFE

SEQ ID NO: 21103 - protein, 10 aa, Artificial Sequence
  Synthetic polypeptide
PCTGGADHFL

SEQ ID NO: 21104 - protein, 15 aa, Artificial Sequence
  Synthetic polypeptide
AQEFDIILGNMVPTS

SEQ ID NO: 21105 - protein, 65 aa, Artificial Sequence
  Synthetic polypeptide
LGIWQTSQKLTKCGQVRWLTPVIPALREAEAGGVLEPRSSTSSWATWCPPADLSSFSVRVSAGHV

SEQ ID NO: 21106 - protein, 203 aa, Artificial Sequence
  Synthetic polypeptide
SQHFERLRLEESLSPGVRHHPGQHGAHQLTSPPSQSESLLAMFDPLSSHEGASAVVRPKVHYARPSHPPPDPPILEGAVGGNEARLPNFGSHVLTPAEMEAFKQRHSYPERLVRSRSSDIVSSVRRPMSDPSWNRRPGNEERELPPAAAIGATSLVAAPHSSSSSPSKDSSRGETEERKDSDDEKSDRNRPWWRKRFVSAMPK

SEQ ID NO: 21107 - protein, 208 aa, Artificial Sequence
  Synthetic polypeptide
SQHFERLRLEESLSPGVRHHPGQHGAHQLTSPPSQSESLLAMFDPLSSHEGASAVVRPKVHYARPSHPPPDPPILEGAVGGNEARLPNFGSHVLTPAEMEAFKQRHSYPERLVRSRSSDIVSSVRRPMSDPSWNRRPGNEERELPPAAAIGATSLVAAPHSSSSSPSKDSSRGETEERKDSDDEKSDRNRPWWRKRFVSAMPKAPIPF

SEQ ID NO: 21108 - protein, 675 aa, Artificial Sequence
  Synthetic polypeptide
SQHFERLRLEESLSPGVRHHPGQHGAHQLTSPPSQSESLLAMFDPLSSHEGASAVVRPKVHYARPSHPPPDPPILEGAVGGNEARLPNFGSHVLTPAEMEAFKQRHSYPERLVRSRSSDIVSSVRRPMSDPSWNRRPGNEERELPPAAAIGATSLVAAPHSSSSSPSKDSSRGETEERKDSDDEKSDRNRPWWRKRFVSAMPKAPIPFRKKEKQEKDKDDLGPDRFSTLTDDPSPRLSAQAQVAEDILDKYRNAIKRTSPSDGAMANYESTEVMGDGESAHDSPRDEALQNISADDLPDSASQAAHPQDSAFSYRDAKKKLRLALCSADSVAFPVLTHSTRNGLPDHTDPEDNEIVCFLKVQIAEAINLQDKNLMAQLQETMRCVCRFDNRTCRKLLASIAEDYRKRAPYIAYLTRCRQGLQTTQAHLERLLQRVLRDKEVANRYFTTVCVRLLLESKEKKIREFIQDFQKLTAADDKTAQVEDFLQFLYGAMAQDVIWQNASEEQLQDAQLAIERSVMNRIFKLAFYPNQDGDILRDQVLHEHIQRLSKVVTANHRALQIPEVYLREAPWPSAQSEIRTISAYKTPRDKVQCILRMCSTIMNLLSLANEDSVPGADDFVPVLVFVLIKANPPCLLSTVQYISSFYASCLSGEESYWWMQFTAAVEFIKTIDDRK

SEQ ID NO: 21109 - protein, 693 aa, Artificial Sequence
  Synthetic polypeptide
SQHFERLRLEESLSPGVRHHPGQHGAHQLTSPPSQSESLLAMFDPLSSHEGASAVVRPKVHYARPSHPPPDPPILEGAVGGNEARLPNFGSHVLTPAEMEAFKQRHSYPERLVRSRSSDIVSSVRRPMSDPSWNRRPGNEERELPPAAAIGATSLVAAPHSSSSSPSKDSSRGETEERKDSDDEKSDRNRPWWRKRFVSAMPKAPIPFRKKEKQEKDKDDLGPDRFSTLTDDPSPRLSAQAQVAEDILDKYRNAIKRTSPSDGAMANYESTGDNHDRDLSSKLLYHSDKEVMGDGESAHDSPRDEALQNISADDLPDSASQAAHPQDSAFSYRDAKKKLRLALCSADSVAFPVLTHSTRNGLPDHTDPEDNEIVCFLKVQIAEAINLQDKNLMAQLQETMRCVCRFDNRTCRKLLASIAEDYRKRAPYIAYLTRCRQGLQTTQAHLERLLQRVLRDKEVANRYFTTVCVRLLLESKEKKIREFIQDFQKLTAADDKTAQVEDFLQFLYGAMAQDVIWQNASEEQLQDAQLAIERSVMNRIFKLAFYPNQDGDILRDQVLHEHIQRLSKVVTANHRALQIPEVYLREAPWPSAQSEIRTISAYKTPRDKVQCILRMCSTIMNLLSLANEDSVPGADDFVPVLVFVLIKANPPCLLSTVQYISSFYASCLSGEESYWWMQFTAAVEFIKTIDDRK

SEQ ID NO: 21110 - protein, 648 aa, Artificial Sequence
  Synthetic polypeptide
SQHFERLRLEESLSPGVRHHPGQHGAHQLTSPPSQSESLLAMFDPLSSHEGASAVVRPKVHYARPSHPPPDPPILEGAVGGNEARLPNFGSHVLTPAEMEAFKQRHSYPERLVRSRSSDIVSSVRRPMSDPSWNRRPGNEERELPPAAAIGATSLVAAPHSSSSSPSKDSSRGETEERKDSDDEKSDRNRPWWRKRFVSAMPKDDPSPRLSAQAQVAEDILDKYRNAIKRTSPSDGAMANYESTEVMGDGESAHDSPRDEALQNISADDLPDSASQAAHPQDSAFSYRDAKKKLRLALCSADSVAFPVLTHSTRNGLPDHTDPEDNEIVCFLKVQIAEAINLQDKNLMAQLQETMRCVCRFDNRTCRKLLASIAEDYRKRAPYIAYLTRCRQGLQTTQAHLERLLQRVLRDKEVANRYFTTVCVRLLLESKEKKIREFIQDFQKLTAADDKTAQVEDFLQFLYGAMAQDVIWQNASEEQLQDAQLAIERSVMNRIFKLAFYPNQDGDILRDQVLHEHIQRLSKVVTANHRALQIPEVYLREAPWPSAQSEIRTISAYKTPRDKVQCILRMCSTIMNLLSLANEDSVPGADDFVPVLVFVLIKANPPCLLSTVQYISSFYASCLSGEESYWWMQFTAAVEFIKTIDDRK

SEQ ID NO: 21111 - protein, 99 aa, Artificial Sequence
  Synthetic polypeptide
EVRSPSARQPPRLGSEERLRPAATPSGREVGGSAPRPASRPARPAAPSGREVGGVSPPPGQPPRPGGHAIFKLTYLSNHDYKHLYFESDAATVNEIVLK

SEQ ID NO: 21112 - protein, 140 aa, Artificial Sequence
  Synthetic polypeptide
EVRSPSARQPPRLGSEERLRPAATPSGREVGGSAPRPASRPARPAAPSGREVGGVSPPPGQPPRPGGHAIFKLTYLSNHDYKHLYFESDAATVNEIVLKVNYILESRASTARADYFAQKQRKLNRRTSFSFQKEKKSGQQ

SEQ ID NO: 21113 - protein, 55 aa, Artificial Sequence
  Synthetic polypeptide
GASPPGSHPVREGGGGVSPPPGQPPRPASGPVREGGRGGQPPTRPAAPSGRSRNI

SEQ ID NO: 21114 - protein, 23 aa, Artificial Sequence
  Synthetic polypeptide
GGSAPHPASRPVREVTQYLNSRI

SEQ ID NO: 21115 - protein, 47 aa, Artificial Sequence
  Synthetic polypeptide
EVRSPSARQPPRLGSHAIFKLTYLSNHDYKHLYFESDAATVNEIVLK

SEQ ID NO: 21116 - protein, 88 aa, Artificial Sequence
  Synthetic polypeptide
EVRSPSARQPPRLGSHAIFKLTYLSNHDYKHLYFESDAATVNEIVLKVNYILESRASTARADYFAQKQRKLNRRTSFSFQKEKKSGQQ

SEQ ID NO: 21117 - protein, 32 aa, Artificial Sequence
  Synthetic polypeptide
EVRSPSARQPPRLRSEEPLRPAATPSGKSRNI

SEQ ID NO: 21118 - protein, 21 aa, Artificial Sequence
  Synthetic polypeptide
GAPPPGSHPVWEVTQYLNSRI

SEQ ID NO: 21119 - protein, 32 aa, Artificial Sequence
  Synthetic polypeptide
EVRRPSAWQPPRLRSEEPLRPAAAPSEKSRNI

SEQ ID NO: 21120 - protein, 47 aa, Artificial Sequence
  Synthetic polypeptide
EVRSPSARQPPRLRSHAIFKLTYLSNHDYKHLYFESDAATVNEIVLK

SEQ ID NO: 21121 - protein, 88 aa, Artificial Sequence
  Synthetic polypeptide
EVRSPSARQPPRLRSHAIFKLTYLSNHDYKHLYFESDAATVNEIVLKVNYILESRASTARADYFAQKQRKLNRRTSFSFQKEKKSGQQ

SEQ ID NO: 21122 - protein, 10 aa, Artificial Sequence
  Synthetic polypeptide
EVTQYLNSRI

SEQ ID NO: 21123 - protein, 47 aa, Artificial Sequence
  Synthetic polypeptide
EVRRPSAWQPPRLRSHAIFKLTYLSNHDYKHLYFESDAATVNEIVLK

SEQ ID NO: 21124 - protein, 88 aa, Artificial Sequence
  Synthetic polypeptide
EVRRPSAWQPPRLRSHAIFKLTYLSNHDYKHLYFESDAATVNEIVLKVNYILESRASTARADYFAQKQRKLNRRTSFSFQKEKKSGQQ

SEQ ID NO: 21125 - protein, 10 aa, Artificial Sequence
  Synthetic polypeptide
EVTQYLNSRI

SEQ ID NO: 21126 - protein, 42 aa, Artificial Sequence
  Synthetic polypeptide
GAPLPGRDPVWEVKSVSARPPLLRSEETLCLATAPSEKSRNI

SEQ ID NO: 21127 - protein, 79 aa, Artificial Sequence
  Synthetic polypeptide
EVKILVIPGISGDKVEIDPVTNQKASTKFWIKQKPISIDSDLLCACDLAEEKSPRFRSSLLAESKRGLSAVAVHRASAQ

SEQ ID NO: 21128 - protein, 87 aa, Artificial Sequence
  Synthetic polypeptide
EVKILVIPGISGDKVEIDPVTNQKASTKFWIKQKPISIDSDLLCACDLAEEKSPSHAIFKLTYLSNHDYKHLYFESDAATVNEIVLK

SEQ ID NO: 21129 - protein, 128 aa, Artificial Sequence
  Synthetic polypeptide
EVKILVIPGISGDKVEIDPVTNQKASTKFWIKQKPISIDSDLLCACDLAEEKSPSHAIFKLTYLSNHDYKHLYFESDAATVNEIVLKVNYILESRASTARADYFAQKQRKLNRRTSFSFQKEKKSGQQ

SEQ ID NO: 21130 - protein, 12 aa, Artificial Sequence
  Synthetic polypeptide
RYWLFQVSLETK

SEQ ID NO: 21131 - protein, 30 aa, Artificial Sequence
  Synthetic polypeptide
SYVRSKDTGYSRYLWRQSRDRPCYESESQH

SEQ ID NO: 21132 - protein, 29 aa, Artificial Sequence
  Synthetic polypeptide
DRAIALQPGRQKMLLMDSPLFRWTTQRLP

SEQ ID NO: 21133 - protein, 49 aa, Artificial Sequence
  Synthetic polypeptide
LRSRHCTPAWATKNAAHGFSLIQVDNTKVTMKEILLKAVKRRKGSQKVS

SEQ ID NO: 21134 - protein, 53 aa, Artificial Sequence
  Synthetic polypeptide
LRSRHCTPAWATKNAAHGFSLIQVDNTKVTMKEILLKAVKRRKGSQKVSGACD

SEQ ID NO: 21135 - protein, 205 aa, Artificial Sequence
  Synthetic polypeptide
LRSRHCTPAWATKNAAHGFSLIQVDNTKVTMKEILLKAVKRRKGSQKVSGPQYRLEKQSEPNVAVDLDSTLESQSAWEFCLVRENSISGDKVEIDPVTNQKASTKFWIKQKPISIDSDLLCACDLAEEKSPSHAIFKLTYLSNHDYKHLYFESDAATVNEIVLKVNYILESRASTARADYFAQKQRKLNRRTSFSFQKEKKSGQQ

SEQ ID NO: 21136 - protein, 252 aa, Artificial Sequence
  Synthetic polypeptide
LRSRHCTPAWATKNAAHGFSLIQVDNTKVTMKEILLKAVKRRKGSQKVSGPQYRLEKQSEPNVAVDLDSTLESQSAWEFCLVRENSSRADGVFEEDSQIDIATVQDMLSSHHYKSFKVSMIHRLRFTTDVQLGISGDKVEIDPVTNQKASTKFWIKQKPISIDSDLLCACDLAEEKSPSHAIFKLTYLSNHDYKHLYFESDAATVNEIVLKVNYILESRASTARADYFAQKQRKLNRRTSFSFQKEKKSGQQ

SEQ ID NO: 21137 - protein, 167 aa, Artificial Sequence
  Synthetic polypeptide
LRSRHCTPAWATKNAAHGFSLIQVDNTKVTMKEILLKAVKRRKGSQKVSGSRADGVFEEDSQIDIATVQDMLSSHHYKSFKVSMIHRLRFTTDVQLGISGDKVEIDPVTNQKASTKFWIKQKPISIDSDLLCACDLAEEKSPRFRSSLLAESKRGLSAVAVHRASAQ

SEQ ID NO: 21138 - protein, 175 aa, Artificial Sequence
  Synthetic polypeptide
LRSRHCTPAWATKNAAHGFSLIQVDNTKVTMKEILLKAVKRRKGSQKVSGSRADGVFEEDSQIDIATVQDMLSSHHYKSFKVSMIHRLRFTTDVQLGISGDKVEIDPVTNQKASTKFWIKQKPISIDSDLLCACDLAEEKSPSHAIFKLTYLSNHDYKHLYFESDAATVNEIVLK

SEQ ID NO: 21139 - protein, 216 aa, Artificial Sequence
  Synthetic polypeptide
LRSRHCTPAWATKNAAHGFSLIQVDNTKVTMKEILLKAVKRRKGSQKVSGSRADGVFEEDSQIDIATVQDMLSSHHYKSFKVSMIHRLRFTTDVQLGISGDKVEIDPVTNQKASTKFWIKQKPISIDSDLLCACDLAEEKSPSHAIFKLTYLSNHDYKHLYFESDAATVNEIVLKVNYILESRASTARADYFAQKQRKLNRRTSFSFQKEKKSGQQ

SEQ ID NO: 21140 - protein, 51 aa, Artificial Sequence
  Synthetic polypeptide
QLAEIAPLHSSLGDKKCCSWILPYSGGQHKGYHEGNLTEGSEAKKRIPESF

SEQ ID NO: 21141 - protein, 54 aa, Artificial Sequence
  Synthetic polypeptide
QLAEIAPLHSSLGDKKCCSWILPYSGGQHKGYHEGNLTEGSEAKKRIPESFRCL

SEQ ID NO: 21142 - protein, 59 aa, Artificial Sequence
  Synthetic polypeptide
QLAEIAPLHSSLGDKKCCSWILPYSGGQHKGYHEGNLTEGSEAKKRIPESFRFKGRRGF

SEQ ID NO: 21143 - protein, 67 aa, Artificial Sequence
  Synthetic polypeptide
QLAEIAPLHSSLGDKKCCSWILPYSGGQHKGYHEGNLTEGSEAKKRIPESFRPSVPPGEAERAQCRR

SEQ ID NO: 21144 - protein, 6 aa, Artificial Sequence
  Synthetic polypeptide
LCQPRS

SEQ ID NO: 21145 - protein, 85 aa, Artificial Sequence
  Synthetic polypeptide
PNPIGNSCVKSIHYLCLGFLSFFMELVVTSLLGSVKTVTVPAQELKSLFEKKSLKEKPPISGKQSILSVRLEQCPLQLNNPFNEY

SEQ ID NO: 21146 - protein, 248 aa, Artificial Sequence
  Synthetic polypeptide
PNPIGNSCVKSIHYLCLGFLSFFMELVVTSLLGSVKTVTVPAQELKSLFEKKSLKEKPPISGKQSILSVRLEQCPLQLNNPFNEYSKFDGKGHVGTTATKKIDVYLPLHSSQDRLLPMTVVTMASARVQDLIGLICWQYTSEGREPKLNDNVSAYCLHIAEDDGEVDTDFPPLDSNEPIHKFGFSTLALVEKYSSPGLTSKESLFVRINAAHGFSLIQVDNTKVTMKEILLKAVKRRKGSQKVSGACD

SEQ ID NO: 21147 - protein, 400 aa, Artificial Sequence
  Synthetic polypeptide
PNPIGNSCVKSIHYLCLGFLSFFMELVVTSLLGSVKTVTVPAQELKSLFEKKSLKEKPPISGKQSILSVRLEQCPLQLNNPFNEYSKFDGKGHVGTTATKKIDVYLPLHSSQDRLLPMTVVTMASARVQDLIGLICWQYTSEGREPKLNDNVSAYCLHIAEDDGEVDTDFPPLDSNEPIHKFGFSTLALVEKYSSPGLTSKESLFVRINAAHGFSLIQVDNTKVTMKEILLKAVKRRKGSQKVSGPQYRLEKQSEPNVAVDLDSTLESQSAWEFCLVRENSISGDKVEIDPVTNQKASTKFWIKQKPISIDSDLLCACDLAEEKSPSHAIFKLTYLSNHDYKHLYFESDAATVNEIVLKVNYILESRASTARADYFAQKQRKLNRRTSFSFQKEKKSGQQ

SEQ ID NO: 21148 - protein, 447 aa, Artificial Sequence
  Synthetic polypeptide
PNPIGNSCVKSIHYLCLGFLSFFMELVVTSLLGSVKTVTVPAQELKSLFEKKSLKEKPPISGKQSILSVRLEQCPLQLNNPFNEYSKFDGKGHVGTTATKKIDVYLPLHSSQDRLLPMTVVTMASARVQDLIGLICWQYTSEGREPKLNDNVSAYCLHIAEDDGEVDTDFPPLDSNEPIHKFGFSTLALVEKYSSPGLTSKESLFVRINAAHGFSLIQVDNTKVTMKEILLKAVKRRKGSQKVSGPQYRLEKQSEPNVAVDLDSTLESQSAWEFCLVRENSSRADGVFEEDSQIDIATVQDMLSSHHYKSFKVSMIHRLRFTTDVQLGISGDKVEIDPVTNQKASTKFWIKQKPISIDSDLLCACDLAEEKSPSHAIFKLTYLSNHDYKHLYFESDAATVNEIVLKVNYILESRASTARADYFAQKQRKLNRRTSFSFQKEKKSGQQ

SEQ ID NO: 21149 - protein, 411 aa, Artificial Sequence
  Synthetic polypeptide
PNPIGNSCVKSIHYLCLGFLSFFMELVVTSLLGSVKTVTVPAQELKSLFEKKSLKEKPPISGKQSILSVRLEQCPLQLNNPFNEYSKFDGKGHVGTTATKKIDVYLPLHSSQDRLLPMTVVTMASARVQDLIGLICWQYTSEGREPKLNDNVSAYCLHIAEDDGEVDTDFPPLDSNEPIHKFGFSTLALVEKYSSPGLTSKESLFVRINAAHGFSLIQVDNTKVTMKEILLKAVKRRKGSQKVSGSRADGVFEEDSQIDIATVQDMLSSHHYKSFKVSMIHRLRFTTDVQLGISGDKVEIDPVTNQKASTKFWIKQKPISIDSDLLCACDLAEEKSPSHAIFKLTYLSNHDYKHLYFESDAATVNEIVLKVNYILESRASTARADYFAQKQRKLNRRTSFSFQKEKKSGQQ

SEQ ID NO: 21150 - protein, 43 aa, Artificial Sequence
  Synthetic polypeptide
QLCEVYTLLMFGIPQFLHGASSNISLRICEDCDCASPGVKVTV

SEQ ID NO: 21151 - protein, 311 aa, Artificial Sequence
  Synthetic polypeptide
LTSQQMDNAVYTFETLLHQELGKGPTKEELCKSIQRVLERVLKKYDYDSSSVRKRFFREALLQISIPFLLKKLAPTCKSELPRFQELIFEDFARFILVENTYEEVVLQTVMKDILQAVKEAAVQRKHNLYRDSMVMHNSDPNLHLLAEGAPIDWGEEYSNSGGGGSPSPSTPESATLSEKRRRAKQVVSVVQDEEVGLPFEASPESPPPASPDGVTEIRGLLAQGLRPESPPPAGPLLNGAPAGESPQPKAAPEASSPPASPLQHLLPGKAVDLGPPKPSDQETGEQVSSPSSHPALHTTTEDSAGVQTEF

SEQ ID NO: 21152 - protein, 214 aa, Artificial Sequence
  Synthetic polypeptide
PGTLSPPLLGTSVPLPTWLILTHFPANGQCRVYVRDPPAPGAGEGAHQGGAVQVHPAGPGAGAEEIRLRQQLCAEEVLPGGAAADQHPVPAQEAGPYLQVGAAPVPGADLRGLCQVHPGGKHVRGGGAADRHEGHPAGCEGGRGAEEAQPLPGQHGHAQQRPQPAPAGRGRPHRLGRGVQQQRRGRQPQPQHPGVSHPLGKATARQAGGLCGPG

SEQ ID NO: 21153 - protein, 62 aa, Artificial Sequence
  Synthetic polypeptide
WHALSSSAWNICASAHLANSDSLPSKWTMPCIRSRPSCTRSWGRGPPRRSCASPSSGSWSGC

SEQ ID NO: 21154 - protein, 550 aa, Artificial Sequence
  Synthetic polypeptide
GIPEDSKVEGPAFTDAIRMYRQSKELYGTWEMLCGNEVQILSNLVMEELGPELKAELGPRLKGKPQERQRQWIQISDAVYHMVYEQAKARFEEVLSKVQQVQPAMQAVIRTDMDQIITSKEHLASKIRAFILPKAEVCVRNHVQPYIPSILEALMVPTSQGFTEVRDVFFKEVTDMNLNVINEGGIDKLGEYMEKLSRLAYHPLKMQSCYEKMESLRLDGLQQRFDVSSTSVFKQRAQIHMREQMDNAVYTFETLLHQELGKGPTKEELCKSIQRVLERVLKKYDYDSSSVRKRFFREALLQISIPFLLKKLAPTCKSELPRFQELIFEDFARFILVENTYEEVVLQTVMKDILQAVKEAAVQRKHNLYRDSMVMHNSDPNLHLLAEGAPIDWGEEYSNSGGGGSPSPSTPESATLSEKRRRAKQVVSVVQDEEVGLPFEASPESPPPASPDGVTEIRGLLAQGLRPESPPPAGPLLNGAPAGESPQPKAAPEASSPPASPLQHLLPGKAVDLGPPKPSDQETGEQVSSPSSHPALHTTTEDSAGVQTEF

SEQ ID NO: 21155 - protein, 10 aa, Artificial Sequence
  Synthetic polypeptide
SNKESLRTPR

SEQ ID NO: 21156 - protein, 34 aa, Artificial Sequence
  Synthetic polypeptide
SWLCHSLLCDPGPVACPLTVVSSSVIICKAIRNP

SEQ ID NO: 21157 - protein, 580 aa, Artificial Sequence
  Synthetic polypeptide
NLWPMGPDQPIACFCQQSLLEQRHAHLFLDGIPEDSKVEGPAFTDAIRMYRQSKELYGTWEMLCGNEVQILSNLVMEELGPELKAELGPRLKGKPQERQRQWIQISDAVYHMVYEQAKARFEEVLSKVQQVQPAMQAVIRTDMDQIITSKEHLASKIRAFILPKAEVCVRNHVQPYIPSILEALMVPTSQGFTEVRDVFFKEVTDMNLNVINEGGIDKLGEYMEKLSRLAYHPLKMQSCYEKMESLRLDGLQQRFDVSSTSVFKQRAQIHMREQMDNAVYTFETLLHQELGKGPTKEELCKSIQRVLERVLKKYDYDSSSVRKRFFREALLQISIPFLLKKLAPTCKSELPRFQELIFEDFARFILVENTYEEVVLQTVMKDILQAVKEAAVQRKHNLYRDSMVMHNSDPNLHLLAEGAPIDWGEEYSNSGGGGSPSPSTPESATLSEKRRRAKQVVSVVQDEEVGLPFEASPESPPPASPDGVTEIRGLLAQGLRPESPPPAGPLLNGAPAGESPQPKAAPEASSPPASPLQHLLPGKAVDLGPPKPSDQETGEQVSSPSSHPALHTTTEDSAGVQTEF

SEQ ID NO: 21158 - protein, 32 aa, Artificial Sequence
  Synthetic polypeptide
PMAYGPRSANCLFLSTKFIGAEARSFVSGWNP

SEQ ID NO: 21159 - protein, 37 aa, Artificial Sequence
  Synthetic polypeptide
TYGLWAQISQLPVSVNKVYWSRGTLICFWMESLRTPR

SEQ ID NO: 21160 - protein, 686 aa, Artificial Sequence
  Synthetic polypeptide
ARVPLDERIVFSGNLFQHQEDSKKWRNRFSLVPHNYGLVLYENKAAYERQVPPRAVINSAGYKILTSVDQYLELIGNSLPGTTAKSGSAPILKCPTQFPLILWHPYARHYYFCMMTEAEQDKWQAVLQDCIRHCNNGIPEDSKVEGPAFTDAIRMYRQSKELYGTWEMLCGNEVQILSNLVMEELGPELKAELGPRLKGKPQERQRQWIQISDAVYHMVYEQAKARFEEVLSKVQQVQPAMQAVIRTDMDQIITSKEHLASKIRAFILPKAEVCVRNHVQPYIPSILEALMVPTSQGFTEVRDVFFKEVTDMNLNVINEGGIDKLGEYMEKLSRLAYHPLKMQSCYEKMESLRLDGLQQRFDVSSTSVFKQRAQIHMREQMDNAVYTFETLLHQELGKGPTKEELCKSIQRVLERVLKKYDYDSSSVRKRFFREALLQISIPFLLKKLAPTCKSELPRFQELIFEDFARFILVENTYEEVVLQTVMKDILQAVKEAAVQRKHNLYRDSMVMHNSDPNLHLLAEGAPIDWGEEYSNSGGGGSPSPSTPESATLSEKRRRAKQVVSVVQDEEVGLPFEASPESPPPASPDGVTEIRGLLAQGLRPESPPPAGPLLNGAPAGESPQPKAAPEASSPPASPLQHLLPGKAVDLGPPKPSDQETGEQVSSPSSHPALHTTTEDSAGVQTEF

SEQ ID NO: 21161 - protein, 114 aa, Artificial Sequence
  Synthetic polypeptide
GLGCHWTSASSSRGTSSSTRRTARSGETASASCPTTTGWCSTKTKRPMSGRSHHEPSSTVQATKSSRPWTNTWSSLATPYQGPRQSRAVPPSSSAPHSSRSSSGILMRVTTTSA

SEQ ID NO: 21162 - protein, 47 aa, Artificial Sequence
  Synthetic polypeptide
GSGATGRAHRLLGEPLPAPGGQQEVEKPLQPRAPQLRAGALRKQSGL

SEQ ID NO: 21163 - protein, 12 aa, Artificial Sequence
  Synthetic polypeptide
EFWHLKKKPGRS

SEQ ID NO: 21164 - protein, 741 aa, Artificial Sequence
  Synthetic polypeptide
SPPYMRMRVLASQEKTGKILTEFLQFYEDQYGVALFNSMRHEIEGTGLPQAQLLWRKVPLDERIVFSGNLFQHQEDSKKWRNRFSLVPHNYGLVLYENKAAYERQVPPRAVINSAGYKILTSVDQYLELIGNSLPGTTAKSGSAPILKCPTQFPLILWHPYARHYYFCMMTEAEQDKWQAVLQDCIRHCNNGIPEDSKVEGPAFTDAIRMYRQSKELYGTWEMLCGNEVQILSNLVMEELGPELKAELGPRLKGKPQERQRQWIQISDAVYHMVYEQAKARFEEVLSKVQQVQPAMQAVIRTDMDQIITSKEHLASKIRAFILPKAEVCVRNHVQPYIPSILEALMVPTSQGFTEVRDVFFKEVTDMNLNVINEGGIDKLGEYMEKLSRLAYHPLKMQSCYEKMESLRLDGLQQRFDVSSTSVFKQRAQIHMREQMDNAVYTFETLLHQELGKGPTKEELCKSIQRVLERVLKKYDYDSSSVRKRFFREALLQISIPFLLKKLAPTCKSELPRFQELIFEDFARFILVENTYEEVVLQTVMKDILQAVKEAAVQRKHNLYRDSMVMHNSDPNLHLLAEGAPIDWGEEYSNSGGGGSPSPSTPESATLSEKRRRAKQVVSVVQDEEVGLPFEASPESPPPASPDGVTEIRGLLAQGLRPESPPPAGPLLNGAPAGESPQPKAAPEASSPPASPLQHLLPGKAVDLGPPKPSDQETGEQVSSPSSHPALHTTTEDSAGVQTEF

SEQ ID NO: 21165 - protein, 29 aa, Artificial Sequence
  Synthetic polypeptide
VLEPSLHEDESSGISRKNREDPDGVPPVL

SEQ ID NO: 21166 - protein, 733 aa, Artificial Sequence
  Synthetic polypeptide
AQRFWEKTGKILTEFLQFYEDQYGVALFNSMRHEIEGTGLPQAQLLWRKVPLDERIVFSGNLFQHQEDSKKWRNRFSLVPHNYGLVLYENKAAYERQVPPRAVINSAGYKILTSVDQYLELIGNSLPGTTAKSGSAPILKCPTQFPLILWHPYARHYYFCMMTEAEQDKWQAVLQDCIRHCNNGIPEDSKVEGPAFTDAIRMYRQSKELYGTWEMLCGNEVQILSNLVMEELGPELKAELGPRLKGKPQERQRQWIQISDAVYHMVYEQAKARFEEVLSKVQQVQPAMQAVIRTDMDQIITSKEHLASKIRAFILPKAEVCVRNHVQPYIPSILEALMVPTSQGFTEVRDVFFKEVTDMNLNVINEGGIDKLGEYMEKLSRLAYHPLKMQSCYEKMESLRLDGLQQRFDVSSTSVFKQRAQIHMREQMDNAVYTFETLLHQELGKGPTKEELCKSIQRVLERVLKKYDYDSSSVRKRFFREALLQISIPFLLKKLAPTCKSELPRFQELIFEDFARFILVENTYEEVVLQTVMKDILQAVKEAAVQRKHNLYRDSMVMHNSDPNLHLLAEGAPIDWGEEYSNSGGGGSPSPSTPESATLSEKRRRAKQVVSVVQDEEVGLPFEASPESPPPASPDGVTEIRGLLAQGLRPESPPPAGPLLNGAPAGESPQPKAAPEASSPPASPLQHLLPGKAVDLGPPKPSDQETGEQVSSPSSHPALHTTTEDSAGVQTEF

SEQ ID NO: 21167 - protein, 11 aa, Artificial Sequence
  Synthetic polypeptide
PRGFGKKPGRS

SEQ ID NO: 21168 - protein, 19 aa, Artificial Sequence
  Synthetic polypeptide
SPEVLGKNREDPDGVPPVL

SEQ ID NO: 21169 - protein, 22 aa, Artificial Sequence
  Synthetic polypeptide
LGFLLFEMGKNREDPDGVPPVL

SEQ ID NO: 21170 - protein, 736 aa, Artificial Sequence
  Synthetic polypeptide
MVFSFLKWEKTGKILTEFLQFYEDQYGVALFNSMRHEIEGTGLPQAQLLWRKVPLDERIVFSGNLFQHQEDSKKWRNRFSLVPHNYGLVLYENKAAYERQVPPRAVINSAGYKILTSVDQYLELIGNSLPGTTAKSGSAPILKCPTQFPLILWHPYARHYYFCMMTEAEQDKWQAVLQDCIRHCNNGIPEDSKVEGPAFTDAIRMYRQSKELYGTWEMLCGNEVQILSNLVMEELGPELKAELGPRLKGKPQERQRQWIQISDAVYHMVYEQAKARFEEVLSKVQQVQPAMQAVIRTDMDQIITSKEHLASKIRAFILPKAEVCVRNHVQPYIPSILEALMVPTSQGFTEVRDVFFKEVTDMNLNVINEGGIDKLGEYMEKLSRLAYHPLKMQSCYEKMESLRLDGLQQRFDVSSTSVFKQRAQIHMREQMDNAVYTFETLLHQELGKGPTKEELCKSIQRVLERVLKKYDYDSSSVRKRFFREALLQISIPFLLKKLAPTCKSELPRFQELIFEDFARFILVENTYEEVVLQTVMKDILQAVKEAAVQRKHNLYRDSMVMHNSDPNLHLLAEGAPIDWGEEYSNSGGGGSPSPSTPESATLSEKRRRAKQVVSVVQDEEVGLPFEASPESPPPASPDGVTEIRGLLAQGLRPESPPPAGPLLNGAPAGESPQPKAAPEASSPPASPLQHLLPGKAVDLGPPKPSDQETGEQVSSPSSHPALHTTTEDSAGVQTEF

SEQ ID NO: 21171 - protein, 8 aa, Artificial Sequence
  Synthetic polypeptide
NGKKPGRS

SEQ ID NO: 21172 - protein, 19 aa, Artificial Sequence
  Synthetic polypeptide
ELPNNNVKCMREVKKPGRS

SEQ ID NO: 21173 - protein, 736 aa, Artificial Sequence
  Synthetic polypeptide
QREMHERSEKTGKILTEFLQFYEDQYGVALFNSMRHEIEGTGLPQAQLLWRKVPLDERIVFSGNLFQHQEDSKKWRNRFSLVPHNYGLVLYENKAAYERQVPPRAVINSAGYKILTSVDQYLELIGNSLPGTTAKSGSAPILKCPTQFPLILWHPYARHYYFCMMTEAEQDKWQAVLQDCIRHCNNGIPEDSKVEGPAFTDAIRMYRQSKELYGTWEMLCGNEVQILSNLVMEELGPELKAELGPRLKGKPQERQRQWIQISDAVYHMVYEQAKARFEEVLSKVQQVQPAMQAVIRTDMDQIITSKEHLASKIRAFILPKAEVCVRNHVQPYIPSILEALMVPTSQGFTEVRDVFFKEVTDMNLNVINEGGIDKLGEYMEKLSRLAYHPLKMQSCYEKMESLRLDGLQQRFDVSSTSVFKQRAQIHMREQMDNAVYTFETLLHQELGKGPTKEELCKSIQRVLERVLKKYDYDSSSVRKRFFREALLQISIPFLLKKLAPTCKSELPRFQELIFEDFARFILVENTYEEVVLQTVMKDILQAVKEAAVQRKHNLYRDSMVMHNSDPNLHLLAEGAPIDWGEEYSNSGGGGSPSPSTPESATLSEKRRRAKQVVSVVQDEEVGLPFEASPESPPPASPDGVTEIRGLLAQGLRPESPPPAGPLLNGAPAGESPQPKAAPEASSPPASPLQHLLPGKAVDLGPPKPSDQETGEQVSSPSSHPALHTTTEDSAGVQTEF

SEQ ID NO: 21174 - protein, 7 aa, Artificial Sequence
  Synthetic polypeptide
LKKPGRS

SEQ ID NO: 21175 - protein, 730 aa, Artificial Sequence
  Synthetic polypeptide
MTEKTGKILTEFLQFYEDQYGVALFNSMRHEIEGTGLPQAQLLWRKVPLDERIVFSGNLFQHQEDSKKWRNRFSLVPHNYGLVLYENKAAYERQVPPRAVINSAGYKILTSVDQYLELIGNSLPGTTAKSGSAPILKCPTQFPLILWHPYARHYYFCMMTEAEQDKWQAVLQDCIRHCNNGIPEDSKVEGPAFTDAIRMYRQSKELYGTWEMLCGNEVQILSNLVMEELGPELKAELGPRLKGKPQERQRQWIQISDAVYHMVYEQAKARFEEVLSKVQQVQPAMQAVIRTDMDQIITSKEHLASKIRAFILPKAEVCVRNHVQPYIPSILEALMVPTSQGFTEVRDVFFKEVTDMNLNVINEGGIDKLGEYMEKLSRLAYHPLKMQSCYEKMESLRLDGLQQRFDVSSTSVFKQRAQIHMREQMDNAVYTFETLLHQELGKGPTKEELCKSIQRVLERVLKKYDYDSSSVRKRFFREALLQISIPFLLKKLAPTCKSELPRFQELIFEDFARFILVENTYEEVVLQTVMKDILQAVKEAAVQRKHNLYRDSMVMHNSDPNLHLLAEGAPIDWGEEYSNSGGGGSPSPSTPESATLSEKRRRAKQVVSVVQDEEVGLPFEASPESPPPASPDGVTEIRGLLAQGLRPESPPPAGPLLNGAPAGESPQPKAAPEASSPPASPLQHLLPGKAVDLGPPKPSDQETGEQVSSPSSHPALHTTTEDSAGVQTEF

SEQ ID NO: 21176 - protein, 19 aa, Artificial Sequence
  Synthetic polypeptide
HPTHSRKNREDPDGVPPVL

SEQ ID NO: 21177 - protein, 735 aa, Artificial Sequence
  Synthetic polypeptide
NSIQHIVEKTGKILTEFLQFYEDQYGVALFNSMRHEIEGTGLPQAQLLWRKVPLDERIVFSGNLFQHQEDSKKWRNRFSLVPHNYGLVLYENKAAYERQVPPRAVINSAGYKILTSVDQYLELIGNSLPGTTAKSGSAPILKCPTQFPLILWHPYARHYYFCMMTEAEQDKWQAVLQDCIRHCNNGIPEDSKVEGPAFTDAIRMYRQSKELYGTWEMLCGNEVQILSNLVMEELGPELKAELGPRLKGKPQERQRQWIQISDAVYHMVYEQAKARFEEVLSKVQQVQPAMQAVIRTDMDQIITSKEHLASKIRAFILPKAEVCVRNHVQPYIPSILEALMVPTSQGFTEVRDVFFKEVTDMNLNVINEGGIDKLGEYMEKLSRLAYHPLKMQSCYEKMESLRLDGLQQRFDVSSTSVFKQRAQIHMREQMDNAVYTFETLLHQELGKGPTKEELCKSIQRVLERVLKKYDYDSSSVRKRFFREALLQISIPFLLKKLAPTCKSELPRFQELIFEDFARFILVENTYEEVVLQTVMKDILQAVKEAAVQRKHNLYRDSMVMHNSDPNLHLLAEGAPIDWGEEYSNSGGGGSPSPSTPESATLSEKRRRAKQVVSVVQDEEVGLPFEASPESPPPASPDGVTEIRGLLAQGLRPESPPPAGPLLNGAPAGESPQPKAAPEASSPPASPLQHLLPGKAVDLGPPKPSDQETGEQVSSPSSHPALHTTTEDSAGVQTEF

SEQ ID NO: 21178 - protein, 732 aa, Artificial Sequence
  Synthetic polypeptide
HPTHKKTGKILTEFLQFYEDQYGVALFNSMRHEIEGTGLPQAQLLWRKVPLDERIVFSGNLFQHQEDSKKWRNRFSLVPHNYGLVLYENKAAYERQVPPRAVINSAGYKILTSVDQYLELIGNSLPGTTAKSGSAPILKCPTQFPLILWHPYARHYYFCMMTEAEQDKWQAVLQDCIRHCNNGIPEDSKVEGPAFTDAIRMYRQSKELYGTWEMLCGNEVQILSNLVMEELGPELKAELGPRLKGKPQERQRQWIQISDAVYHMVYEQAKARFEEVLSKVQQVQPAMQAVIRTDMDQIITSKEHLASKIRAFILPKAEVCVRNHVQPYIPSILEALMVPTSQGFTEVRDVFFKEVTDMNLNVINEGGIDKLGEYMEKLSRLAYHPLKMQSCYEKMESLRLDGLQQRFDVSSTSVFKQRAQIHMREQMDNAVYTFETLLHQELGKGPTKEELCKSIQRVLERVLKKYDYDSSSVRKRFFREALLQISIPFLLKKLAPTCKSELPRFQELIFEDFARFILVENTYEEVVLQTVMKDILQAVKEAAVQRKHNLYRDSMVMHNSDPNLHLLAEGAPIDWGEEYSNSGGGGSPSPSTPESATLSEKRRRAKQVVSVVQDEEVGLPFEASPESPPPASPDGVTEIRGLLAQGLRPESPPPAGPLLNGAPAGESPQPKAAPEASSPPASPLQHLLPGKAVDLGPPKPSDQETGEQVSSPSSHPALHTTTEDSAGVQTEF

SEQ ID NO: 21179 - protein, 12 aa, Artificial Sequence
  Synthetic polypeptide
NSIQHIKKPGRS

SEQ ID NO: 21180 - protein, 28 aa, Artificial Sequence
  Synthetic polypeptide
QCCWIQPRNLCLGRRKNREDPDGVPPVL

SEQ ID NO: 21181 - protein, 742 aa, Artificial Sequence
  Synthetic polypeptide
SAVGSNHGICAWEGEKTGKILTEFLQFYEDQYGVALFNSMRHEIEGTGLPQAQLLWRKVPLDERIVFSGNLFQHQEDSKKWRNRFSLVPHNYGLVLYENKAAYERQVPPRAVINSAGYKILTSVDQYLELIGNSLPGTTAKSGSAPILKCPTQFPLILWHPYARHYYFCMMTEAEQDKWQAVLQDCIRHCNNGIPEDSKVEGPAFTDAIRMYRQSKELYGTWEMLCGNEVQILSNLVMEELGPELKAELGPRLKGKPQERQRQWIQISDAVYHMVYEQAKARFEEVLSKVQQVQPAMQAVIRTDMDQIITSKEHLASKIRAFILPKAEVCVRNHVQPYIPSILEALMVPTSQGFTEVRDVFFKEVTDMNLNVINEGGIDKLGEYMEKLSRLAYHPLKMQSCYEKMESLRLDGLQQRFDVSSTSVFKQRAQIHMREQMDNAVYTFETLLHQELGKGPTKEELCKSIQRVLERVLKKYDYDSSSVRKRFFREALLQISIPFLLKKLAPTCKSELPRFQELIFEDFARFILVENTYEEVVLQTVMKDILQAVKEAAVQRKHNLYRDSMVMHNSDPNLHLLAEGAPIDWGEEYSNSGGGGSPSPSTPESATLSEKRRRAKQVVSVVQDEEVGLPFEASPESPPPASPDGVTEIRGLLAQGLRPESPPPAGPLLNGAPAGESPQPKAAPEASSPPASPLQHLLPGKAVDLGPPKPSDQETGEQVSSPSSHPALHTTTEDSAGVQTEF

SEQ ID NO: 21182 - protein, 21 aa, Artificial Sequence
  Synthetic polypeptide
SVLLDPTTEFVPGKAKKPGRS

SEQ ID NO: 21183 - protein, 45 aa, Artificial Sequence
  Synthetic polypeptide
CRSRRPWYNATATSSSGTHSPAWATMCSRAAGATRPCTSRSTRWW

SEQ ID NO: 21184 - protein, 94 aa, Artificial Sequence
  Synthetic polypeptide
GLALPFTDCVTLNKLLHLSEPQYLLQRGVVKIKRNNAGLGDLGTTQRRLPHPGLTHQPGRLCAHVPLAQPGLALQDQQGGGEGRRELHTHPVPV

SEQ ID NO: 21185 - protein, 158 aa, Artificial Sequence
  Synthetic polypeptide
KLNEIMQVSETLVQRNGDFLIRDSLTSLGDYVLTCRWRNQALHFKINKVVVKAGESYTHIQYLFEQESFDHVPALVRYHVGSRKAVSEQSGAIIYCPVNRTFPLRYLEASYGLGQGSSKPASPVSPSGPKGSHMKRRSVTMTDGLTADKVTRSDGCPT

SEQ ID NO: 21186 - protein, 267 aa, Artificial Sequence
  Synthetic polypeptide
KLNEIMQVSETLVQRNGDFLIRDSLTSLGDYVLTCRWRNQALHFKINKVVVKAGESYTHIQYLFEQESFDHVPALVRYHVGSRKAVSEQSGAIIYCPVNRTFPLRYLEASYGLGQGSSKPASPVSPSGPKGSHMKRRSVTMTDGLTADKVTRSDGCPTSTSLPRPRDSIRSCALSMDQIPDLHSPMSPISESPSSPAYSTVTRVHAAPAAPSATALPASPVARRSSEPQLCPGSAPKTHGESDKGPHTSPSHTLGKASPSPSLSSYS

SEQ ID NO: 21187 - protein, 639 aa, Artificial Sequence
  Synthetic polypeptide
KLNEIMQVSETLVQRNGDFLIRDSLTSLGDYVLTCRWRNQALHFKINKVVVKAGESYTHIQYLFEQESFDHVPALVRYHVGSRKAVSEQSGAIIYCPVNRTFPLRYLEASYGLGQGSSKPASPVSPSGPKGSHMKRRSVTMTDGLTADKVTRSDGCPTSTSLPRPRDSIRSCALSMDQIPDLHSPMSPISESPSSPAYSTVTRVHAAPAAPSATALPASPVARRSSEPQLCPGSAPKTHGESDKGPHTSPSHTLGKASPSPSLSSYSDPDSGHYCQLQPPVRGSREWAATETSSQQARSYGERLKELSENGAPEGDWGKTFTVPIVEVTSSFNPATFQSLLIPRDNRPLEVGLLRKVKELLAEVDARTLARHVTKVDCLVARILGVTKEMQTLMGVRWGMELLTLPHGRQLRLDLLERFHTMSIMLAVDILGCTGSAEERAALLHKTIQLAAELRGTMGNMFSFAAVMGALDMAQISRLEQTWVTLRQRHTEGAILYEKKLKPFLKSLNEGKEGPPLSNTTFPHVLPLITLLECDSAPPEGPEPWGSTEHGVEVVLAHLEAARTVAHHGGLYHTNAEVKLQGFQARPELLEVFSTEFQMRLLWGSQGASSSQARRYEKFDKVLTALSHKLEPAVRSSEL

SEQ ID NO: 21188 - protein, 124 aa, Artificial Sequence
  Synthetic polypeptide
CQEFKTSLANMGCWRARGWQRLCEVLQGEVHPGLIARETPQGIGGGAQTQQHGSPQPCLVPWPHPPRGLGDLGTTQRRLPHPGLTHQPGRLCAHVPLAQPGLALQDQQGGGEGRRELHTHPVPV

SEQ ID NO: 21189 - protein, 349 aa, Artificial Sequence
  Synthetic polypeptide
MGTGLTPVTPALWEAKAGGSPDARSSRPAWPTWAAGEPEAGSDYVKFSKEKYILDSSPEKLHKELEEELKLSSTDLRSHAWYHGRIPREVSETLVQRNGDFLIRDSLTSLGDYVLTCRWRNQALHFKINKVVVKAGESYTHIQYLFEQESFDHVPALVRYHVGSRKAVSEQSGAIIYCPVNRTFPLRYLEASYGLGQGSSKPASPVSPSGPKGSHMKRRSVTMTDGLTADKVTRSDGCPTSTSLPRPRDSIRSCALSMDQIPDLHSPMSPISESPSSPAYSTVTRVHAAPAAPSATALPASPVARRSSEPQLCPGSAPKTHGESDKGPHTSPSHTLGKASPSPSLSSYS

SEQ ID NO: 21190 - protein, 721 aa, Artificial Sequence
  Synthetic polypeptide
MGTGLTPVTPALWEAKAGGSPDARSSRPAWPTWAAGEPEAGSDYVKFSKEKYILDSSPEKLHKELEEELKLSSTDLRSHAWYHGRIPREVSETLVQRNGDFLIRDSLTSLGDYVLTCRWRNQALHFKINKVVVKAGESYTHIQYLFEQESFDHVPALVRYHVGSRKAVSEQSGAIIYCPVNRTFPLRYLEASYGLGQGSSKPASPVSPSGPKGSHMKRRSVTMTDGLTADKVTRSDGCPTSTSLPRPRDSIRSCALSMDQIPDLHSPMSPISESPSSPAYSTVTRVHAAPAAPSATALPASPVARRSSEPQLCPGSAPKTHGESDKGPHTSPSHTLGKASPSPSLSSYSDPDSGHYCQLQPPVRGSREWAATETSSQQARSYGERLKELSENGAPEGDWGKTFTVPIVEVTSSFNPATFQSLLIPRDNRPLEVGLLRKVKELLAEVDARTLARHVTKVDCLVARILGVTKEMQTLMGVRWGMELLTLPHGRQLRLDLLERFHTMSIMLAVDILGCTGSAEERAALLHKTIQLAAELRGTMGNMFSFAAVMGALDMAQISRLEQTWVTLRQRHTEGAILYEKKLKPFLKSLNEGKEGPPLSNTTFPHVLPLITLLECDSAPPEGPEPWGSTEHGVEVVLAHLEAARTVAHHGGLYHTNAEVKLQGFQARPELLEVFSTEFQMRLLWGSQGASSSQARRYEKFDKVLTALSHKLEPAVRSSEL

SEQ ID NO: 21191 - protein, 36 aa, Artificial Sequence
  Synthetic polypeptide
PQHFGRPRQVDHLMPGVQDQPGQHGLLESQRLAATM

SEQ ID NO: 21192 - protein, 70 aa, Artificial Sequence
  Synthetic polypeptide
SQLLRRLRQKKRLNPGGGDSSEQRLHHCTPVWATQRDCISKNKVLQVQGLWESLQPPSVLHSETILSFHQ

SEQ ID NO: 21193 - protein, 877 aa, Artificial Sequence
  Synthetic polypeptide
TQEVEIAVSRDCTTALQSGRHSETASQKIKFFKFKGFGSLSNLPRSFTLRRSSASISRQSHLEPDTFEATQDDMVTVPKSPPAYARSSDMYSHMGTMPRPSIKKAQNSQAARQAQEAGPKPNLVPGGVPDPPGLEAAKEVMVKATGPLEDTPAMEPNPSAVEVDPIRKPEVPTGDVEEERPPRDVHSERAAGEPEAGSDYVKFSKEKYILDSSPEKLHKELEEELKLSSTDLRSHAWYHGRIPREVSETLVQRNGDFLIRDSLTSLGDYVLTCRWRNQALHFKINKVVVKAGESYTHIQYLFEQESFDHVPALVRYHVGSRKAVSEQSGAIIYCPVNRTFPLRYLEASYGLGQGSSKPASPVSPSGPKGSHMKRRSVTMTDGLTADKVTRSDGCPTSTSLPRPRDSIRSCALSMDQIPDLHSPMSPISESPSSPAYSTVTRVHAAPAAPSATALPASPVARRSSEPQLCPGSAPKTHGESDKGPHTSPSHTLGKASPSPSLSSYSDPDSGHYCQLQPPVRGSREWAATETSSQQARSYGERLKELSENGAPEGDWGKTFTVPIVEVTSSFNPATFQSLLIPRDNRPLEVGLLRKVKELLAEVDARTLARHVTKVDCLVARILGVTKEMQTLMGVRWGMELLTLPHGRQLRLDLLERFHTMSIMLAVDILGCTGSAEERAALLHKTIQLAAELRGTMGNMFSFAAVMGALDMAQISRLEQTWVTLRQRHTEGAILYEKKLKPFLKSLNEGKEGPPLSNTTFPHVLPLITLLECDSAPPEGPEPWGSTEHGVEVVLAHLEAARTVAHHGGLYHTNAEVKLQGFQARPELLEVFSTEFQMRLLWGSQGASSSQARRYEKFDKVLTALSHKLEPAVRSSEL

SEQ ID NO: 21194 - protein, 117 aa, Artificial Sequence
  Synthetic polypeptide
FPHVVEGALWEIEYGGRSFPCCSPDSKWASGDLMVLKTGVALHKLFYLPAAIHIRCDLLLLASVMIVRLPQPCGTGGTLERTKQILRHQHCWWTRDGESAKQWRSDEGHFHQTCSGR

SEQ ID NO: 21195 - protein, 156 aa, Artificial Sequence
  Synthetic polypeptide
GFPSHVELVELWREPSKSLGISIVGGRGMGSRLSNGEVMRGIFIKHVLEDSPAGKNGTLKPGDRIVEAPSQSESEPEKAPLCSVPPPPPSAFAEMGSDHTQSSASKISQDVDKEDEFGYSWKNIRERYGTLTGELHMIELEKGHSGLGLSLAGNKD

SEQ ID NO: 21196 - protein, 857 aa, Artificial Sequence
  Synthetic polypeptide
GFPSHVELVELWREPSKSLGISIVGGRGMGSRLSNGEVMRGIFIKHVLEDSPAGKNGTLKPGDRIVEAPSQSESEPEKAPLCSVPPPPPSAFAEMGSDHTQSSASKISQDVDKEDEFGYSWKNIRERYGTLTGELHMIELEKGHSGLGLSLAGNKDRSRMSVFIVGIDPNGAAGKDGRLQIADELLEINGQILYGRSHQNASSIIKCAPSKVKIIFIRNKDAVNQMAVCPGNAVEPLPSNSENLQNKETEPTVTTSDAAVDLSSFKNVQHLELPKDQGGLGIAISEEDTLSGVIIKSLTEHGVAATDGRLKVGDQILAVDDEIVVGYPIEKFISLLKTAKMTVKLTIHAENPDSQAVPSAAGAASGEKKNSSQSLMVPQSGSPEPESIRNTSRSSTPAIFASDPATCPIIPGCETTIEISKGRTGLGLSIVGGSDTLLGAIIIHEVYEEGAACKDGRLWAGDQILEVNGIDLRKATHDEAINVLRQTPQRVRLTLYRDEAPYKEEEVCDTLTIELQKKPGKGLGLSIVGKRNDTGVFVSDIVKGGIADADGRLMQGDQILMVNGEDVRNATQEAVAALLKCSLGTVTLEVGRIKAGPFHSERRPSQSSQVSEGSLSSFTFPLSGSSTSESLESSSKKNALASEIQGLRTVEMKKGPTDSLGISIAGGVGSPLGDVPIFIAMMHPTGVAAQTQKLRVGDRIVTICGTSTEGMTHTQAVNLLKNASGSIEMQVVAGGDVSVVTGHQQEPASSSLSFTGLTSSSIFQDDLGPPQCKSITLERGPDGLGFSIVGGYGSPHGDLPIYVKTVFAKGAASEDGRLKRGDQIIAVNGQSLEGVTHEEAVAILKRTKGTVTLMVLS

SEQ ID NO: 21197 - protein, 93 aa, Artificial Sequence
  Synthetic polypeptide
GFPSHVELVELWREPSKSLGISIVGGRGMGSRLSNGEVMRGIFIKHVLEDSPAGKNGTLKPGDRIVEKSPLPSLLHNLYPKYNFSSTNPFADS

SEQ ID NO: 21198 - protein, 894 aa, Artificial Sequence
  Synthetic polypeptide
GFPSHVELVELWREPSKSLGISIVGGRGMGSRLSNGEVMRGIFIKHVLEDSPAGKNGTLKPGDRIVEVDGMDLRDASHEQAVEAIRKAGNPVVFMVQSIINRPRAPSQSESEPEKAPLCSVPPPPPSAFAEMGSDHTQSSASKISQDVDKEDEFGYSWKNIRERYGTLTGELHMIELEKGHSGLGLSLAGNKDRSRMSVFIVGIDPNGAAGKDGRLQIADELLEINGQILYGRSHQNASSIIKCAPSKVKIIFIRNKDAVNQMAVCPGNAVEPLPSNSENLQNKETEPTVTTSDAAVDLSSFKNVQHLELPKDQGGLGIAISEEDTLSGVIIKSLTEHGVAATDGRLKVGDQILAVDDEIVVGYPIEKFISLLKTAKMTVKLTIHAENPDSQAVPSAAGAASGEKKNSSQSLMVPQSGSPEPESIRNTSRSSTPAIFASDPATCPIIPGCETTIEISKGRTGLGLSIVGGSDTLLGAIIIHEVYEEGAACKDGRLWAGDQILEVNGIDLRKATHDEAINVLRQTPQRVRLTLYRDEAPYKEEEVCDTLTIELQKKPGKGLGLSIVGKRNDTGVFVSDIVKGGIADADGRLMQGDQILMVNGEDVRNATQEAVAALLKCSLGTVTLEVGRIKAGPFHSERRPSQSSQVSEGSLSSFTFPLSGSSTSESLESSSKKNALASEIQGLRTVEMKKGPTDSLGISIAGGVGSPLGDVPIFIAMMHPTGVAAQTQKLRVGDRIVTICGTSTEGMTHTQAVNLLKNASGSIEMQVVAGGDVSVVTGHQQEPASSSLSFTGLTSSSIFQDDLGPPQCKSITLERGPDGLGFSIVGGYGSPHGDLPIYVKTVFAKGAASEDGRLKRGDQIIAVNGQSLEGVTHEEAVAILKRTKGTVTLMVLS

SEQ ID NO: 21199 - protein, 865 aa, Artificial Sequence
  Synthetic polypeptide
GFPSHVELVELWREPSKSLGISIVGGRGMGSRLSNGEVMRGIFIKHVLEDSPAGKNGTLKPGDRIVEVDGMDLRDASHEQAVEAIRKAGNPVVFMVQSIINRPRAPSQSESEPEKAPLCSVPPPPPSAFAEMGSDHTQSSASKISQDVDKEDEFGYSWKNIRERYGTLTGELHMIELEKGHSGLGLSLAGNKDRSRMSVFIVGIDPNGAAGKDGRLQIADELLEINGQILYGRSHQNASSIIKCAPSKVKIIFIRNKDAVNQMAVCPGNAVEPLPSNSENLQNKETEPTVTTSDAAVDLSSFKNVQHLELPKDQGGLGIAISEEDTLSGVIIKSLTEHGVAATDGRLKVGDQILAVDDEIVVGYPIEKFISLLKTAKMTVKLTIHAENPDSQAVPSAAGAASGEKKNSSQSLMVPQSGSPEPESIRNTSRSSTPAIFASDPATCPIIPGCETTIEISKGRTGLGLSIVGGSDTLLGAIIIHEVYEEGAACKDGRLWAGDQILEVNGIDLRKATHDEAINVLRQTPQRVRLTLYRDEAPYKEEEVCDTLTIELQKKPGKGLGLSIVGKRNDTGVFVSDIVKGGIADADGRLMQGDQILMVNGEDVRNATQEAVAALLKVSEGSLSSFTFPLSGSSTSESLESSSKKNALASEIQGLRTVEMKKGPTDSLGISIAGGVGSPLGDVPIFIAMMHPTGVAAQTQKLRVGDRIVTICGTSTEGMTHTQAVNLLKNASGSIEMQVVAGGDVSVVTGHQQEPASSSLSFTGLTSSSIFQDDLGPPQCKSITLERGPDGLGFSIVGGYGSPHGDLPIYVKTVFAKGAASEDGRLKRGDQIIAVNGQSLEGVTHEEAVAILKRTKGTVTLMVLS

SEQ ID NO: 21200 - protein, 927 aa, Artificial Sequence
  Synthetic polypeptide
GFPSHVELVELWREPSKSLGISIVGGRGMGSRLSNGEVMRGIFIKHVLEDSPAGKNGTLKPGDRIVEVDGMDLRDASHEQAVEAIRKAGNPVVFMVQSIINRPRKSPLPSLLHNLYPKYNFSSTNPFADSLQINADKAPSQSESEPEKAPLCSVPPPPPSAFAEMGSDHTQSSASKISQDVDKEDEFGYSWKNIRERYGTLTGELHMIELEKGHSGLGLSLAGNKDRSRMSVFIVGIDPNGAAGKDGRLQIADELLEINGQILYGRSHQNASSIIKCAPSKVKIIFIRNKDAVNQMAVCPGNAVEPLPSNSENLQNKETEPTVTTSDAAVDLSSFKNVQHLELPKDQGGLGIAISEEDTLSGVIIKSLTEHGVAATDGRLKVGDQILAVDDEIVVGYPIEKFISLLKTAKMTVKLTIHAENPDSQAVPSAAGAASGEKKNSSQSLMVPQSGSPEPESIRNTSRSSTPAIFASDPATCPIIPGCETTIEISKGRTGLGLSIVGGSDTLLGAIIIHEVYEEGAACKDGRLWAGDQILEVNGIDLRKATHDEAINVLRQTPQRVRLTLYRDEAPYKEEEVCDTLTIELQKKPGKGLGLSIVGKRNDTGVFVSDIVKGGIADADGRLMQGDQILMVNGEDVRNATQEAVAALLKCSLGTVTLEVGRIKAGPFHSERRPSQSSQVSEGSLSSFTFPLSGSSTSESLESSSKKNALASEIQGLRTVEMKKGPTDSLGISIAGGVGSPLGDVPIFIAMMHPTGVAAQTQKLRVGDRIVTICGTSTEGMTHTQAVNLLKNASGSIEMQVVAGGDVSVVTGHQQEPASSSLSFTGLTSSSIFQDDLGPPQCKSITLERGPDGLGFSIVGGYGSPHGDLPIYVKTVFAKGAASEDGRLKRGDQIIAVNGQSLEGVTHEEAVAILKRTKGTVTLMVLS

SEQ ID NO: 21201 - protein, 898 aa, Artificial Sequence
  Synthetic polypeptide
GFPSHVELVELWREPSKSLGISIVGGRGMGSRLSNGEVMRGIFIKHVLEDSPAGKNGTLKPGDRIVEVDGMDLRDASHEQAVEAIRKAGNPVVFMVQSIINRPRKSPLPSLLHNLYPKYNFSSTNPFADSLQINADKAPSQSESEPEKAPLCSVPPPPPSAFAEMGSDHTQSSASKISQDVDKEDEFGYSWKNIRERYGTLTGELHMIELEKGHSGLGLSLAGNKDRSRMSVFIVGIDPNGAAGKDGRLQIADELLEINGQILYGRSHQNASSIIKCAPSKVKIIFIRNKDAVNQMAVCPGNAVEPLPSNSENLQNKETEPTVTTSDAAVDLSSFKNVQHLELPKDQGGLGIAISEEDTLSGVIIKSLTEHGVAATDGRLKVGDQILAVDDEIVVGYPIEKFISLLKTAKMTVKLTIHAENPDSQAVPSAAGAASGEKKNSSQSLMVPQSGSPEPESIRNTSRSSTPAIFASDPATCPIIPGCETTIEISKGRTGLGLSIVGGSDTLLGAIIIHEVYEEGAACKDGRLWAGDQILEVNGIDLRKATHDEAINVLRQTPQRVRLTLYRDEAPYKEEEVCDTLTIELQKKPGKGLGLSIVGKRNDTGVFVSDIVKGGIADADGRLMQGDQILMVNGEDVRNATQEAVAALLKVSEGSLSSFTFPLSGSSTSESLESSSKKNALASEIQGLRTVEMKKGPTDSLGISIAGGVGSPLGDVPIFIAMMHPTGVAAQTQKLRVGDRIVTICGTSTEGMTHTQAVNLLKNASGSIEMQVVAGGDVSVVTGHQQEPASSSLSFTGLTSSSIFQDDLGPPQCKSITLERGPDGLGFSIVGGYGSPHGDLPIYVKTVFAKGAASEDGRLKRGDQIIAVNGQSLEGVTHEEAVAILKRTKGTVTLMVLS

SEQ ID NO: 21202 - protein, 29 aa, Artificial Sequence
  Synthetic polypeptide
LAPPCLCHDCEASPAMWNWWNSGENQANP

SEQ ID NO: 21203 - protein, 108 aa, Artificial Sequence
  Synthetic polypeptide
DQAQWVKPVIRALREAKIETLPPELFQCRKLRALHLGNNVLQSLPSRVGELTNLTQIELRGNRLECLPVELGECPLLKRSGLVVEEDLFNTLPPEVKERLWRADKEQA

SEQ ID NO: 21204 - protein, 89 aa, Artificial Sequence
  Synthetic polypeptide
GSQDRDAPSGALPVPEAAGPAPGQQRAAVTALQGGRADQPDADRAAGQPAGVPACGAGRVPTAQAQRLGGGGGPVQHTATRGEGAAVEG

SEQ ID NO: 21205 - protein, 41 aa, Artificial Sequence
  Synthetic polypeptide
SEHLGKPRSRRSLRSSSSAGSCGPCTWATTCCSHCPPGWAS

SEQ ID NO: 21206 - protein, 458 aa, Artificial Sequence
  Synthetic polypeptide
HVATYFISGSCSARQQAQIRHQMAEDSKADYSSILQKFNHEQHEYYHTHIPNIFQKIQEMEERRIVRMGESMKTYAEVDRQVIPIIGKCLDGIVKAAESIDQKNDSQLVIEAYKSGFEPPGDIEFEDYTQPMKRTVSDNSLSNSRGEGKPDLKFGGKSKGKLWPFIKKNKLMSLLTSPHQPPPPPPASASPSAVPNGPQSPKQQKEPLSHRFNEFMTSKPKIHCFRSLKRGLSLKLGATPEDFSNLPPEQRRKKLQQKVDELNKEIQKEMDQRDAITKMKDVYLKNPQMGDPASLDHKLAEVSQNIEKLRVETQKFEAWLAEVEGRLPARSEQARRQSGLYDSQNPPTVNNCAQDRESPDGSYTEEQSQESEMKVLATDFDDEFDDEEPLPAIGTCKALYTFEGQNEGTISVVEGETLYVIEEDKGDGWTRIRRNEDEEGYVPTSYVEVCLDKNAKDS

SEQ ID NO: 21207 - protein, 447 aa, Artificial Sequence
  Synthetic polypeptide
HVATYFISGSCSARQQAQIRHQMAEDSKADYSSILQKFNHEQHEYYHTHIPNIFQKIQEMEERRIVRMGESMKTYAEVDRQVIPIIGKCLDGIVKAAESIDQKNDSQLVIEAYKSGFEPPGDIEFEDYTQPMKRTVSDNSLSNSRGEGKPDLKFGGKSKGKLWPFIKKNKPPPPPPASASPSAVPNGPQSPKQQKEPLSHRFNEFMTSKPKIHCFRSLKRGGATPEDFSNLPPEQRRKKLQQKVDELNKEIQKEMDQRDAITKMKDVYLKNPQMGDPASLDHKLAEVSQNIEKLRVETQKFEAWLAEVEGRLPARSEQARRQSGLYDSQNPPTVNNCAQDRESPDGSYTEEQSQESEMKVLATDFDDEFDDEEPLPAIGTCKALYTFEGQNEGTISVVEGETLYVIEEDKGDGWTRIRRNEDEEGYVPTSYVEVCLDKNAKGAKTYI

SEQ ID NO: 21208 - protein, 449 aa, Artificial Sequence
  Synthetic polypeptide
HVATYFISGSCSARQQAQIRHQMAEDSKADYSSILQKFNHEQHEYYHTHIPNIFQKIQEMEERRIVRMGESMKTYAEVDRQVIPIIGKCLDGIVKAAESIDQKNDSQLVIEAYKSGFEPPGDIEFEDYTQPMKRTVSDNSLSNSRGEGKPDLKFGGKSKGKLWPFIKKNKPPPPPPASASPSAVPNGPQSPKQQKEPLSHRFNEFMTSKPKIHCFRSLKRGHSLTLQGATPEDFSNLPPEQRRKKLQQKVDELNKEIQKEMDQRDAITKMKDVYLKNPQMGDPASLDHKLAEVSQNIEKLRVETQKFEAWLAEVEGRLPARSEQARRQSGLYDSQNPPTVNNCAQDRESPDGSYTEEQSQESEMKVLATDFDDEFDDEEPLPAIGTCKALYTFEGQNEGTISVVEGETLYVIEEDKGDGWTRIRRNEDEEGYVPTSYVEVCLDKNAKDS

SEQ ID NO: 21209 - protein, 433 aa, Artificial Sequence
  Synthetic polypeptide
HVATYFISGSCSARQQAQIRHQMAEDSKADYSSILQKFNHEQHEYYHTHIPNIFQKIQEMEERRIVRMGESMKTYAEVDRQVIPIIGKCLDGIVKAAESIDQKNDSQLVIEAYKSGFEPPGDIEFEDYTQPMKRTVSDNSLSNSRGEGKPDLKFGGKSKGKLWPFIKKNKSPKQQKEPLSHRFNEFMTSKPKIHCFRSLKRGLSLKLGATPEDFSNLPPEQRRKKLQQKVDELNKEIQKEMDQRDAITKMKDVYLKNPQMGDPASLDHKLAEVSQNIEKLRVETQKFEAWLAEVEGRLPARSEQARRQSGLYDSQNPPTVNNCAQDRESPDGSYTEEQSQESEMKVLATDFDDEFDDEEPLPAIGTCKALYTFEGQNEGTISVVEGETLYVIEEDKGDGWTRIRRNEDEEGYVPTSYVEVCLDKNAKGAKTYI

SEQ ID NO: 21210 - protein, 59 aa, Artificial Sequence
  Synthetic polypeptide
LCITWKWVQILFLSLTNGMTCGNLLHLWFLFCPTTSSNTSPNGRGQQSRLLIHSPEIQP

SEQ ID NO: 21211 - protein, 84 aa, Artificial Sequence
  Synthetic polypeptide
MYYVEVGSNLVSVAYKWHDMWQLTSSLVPVLPDNKLKYVTKWQRTAKQITHPFSRNSTMSSMNITILTSPTSSRKYKRWRKGGL

SEQ ID NO: 21212 - protein, 81 aa, Artificial Sequence
  Synthetic polypeptide
LSSHVLSSVKAFPSLRGGGTPDRTPVSSGCVCMSLSECIICASVPFSSHRIAAAPGAEAAAVVYTAVSQGLAQSWGLLLLT

SEQ ID NO: 21213 - protein, 28 aa, Artificial Sequence
  Synthetic polypeptide
QLPRGQRLQLSCILLYPRAWLRVGACCY

SEQ ID NO: 21214 - protein, 157 aa, Artificial Sequence
  Synthetic polypeptide
VHNLCFGALLFSQDSSCPGGRGCSCRVYCCIPGPGSELGLAAINLAKLKLFRHYYVLIVCYIYFTRIIAFLLKLAVPFQWKWLYQLLDETATLVFFVLTGYKFRPASDNPYLQLSQEEEDLEMESVVTTSGVMESMKKVKKVTNGSVEPQGEWEGAV

SEQ ID NO: 21215 - protein, 65 aa, Artificial Sequence
  Synthetic polypeptide
GFRGRTKASSRTAPVGSWMRQASRRSTSNSSRSETPPSLPHLFSTSLMKTRTGELSSPSSSRRCR

SEQ ID NO: 21216 - protein, 71 aa, Artificial Sequence
  Synthetic polypeptide
GMANGFALGCQLYSICRSCLEGRDKDSEAVQRLHQGLPQWAAGCGRLPEDLQAILPVRRPHQVCHICFQRL

SEQ ID NO: 21217 - protein, 190 aa, Artificial Sequence
  Synthetic polypeptide
QGWQMGLLLDASSIQSVVAAWRAVIRIPRPYKGFIKDCPSGQLDAAGFQKIYKQFFPFGDPTKFATFVFNVFDENKDGRIEFSEFIQALSVTSRGTLDEKLRWAFKLYDLDNDGYITRNEMLDIVDAIYQMVGNTVELPEEENTPEKRVDRIFAMMDKNADGKLTLQEFQEGSKADPSIVQALSLYDGLV

SEQ ID NO: 21218 - protein, 53 aa, Artificial Sequence
  Synthetic polypeptide
PPSLSTSALPQVQRLHQGLPQWAAGCGRLPEDLQAILPVRRPHQVCHICFQRL

SEQ ID NO: 21219 - protein, 171 aa, Artificial Sequence
  Synthetic polypeptide
RPHFPLLHFPRYKGFIKDCPSGQLDAAGFQKIYKQFFPFGDPTKFATFVFNVFDENKDGRIEFSEFIQALSVTSRGTLDEKLRWAFKLYDLDNDGYITRNEMLDIVDAIYQMVGNTVELPEEENTPEKRVDRIFAMMDKNADGKLTLQEFQEGSKADPSIVQALSLYDGLV

SEQ ID NO: 21220 - protein, 72 aa, Artificial Sequence
  Synthetic polypeptide
SALTFHFCTSPGTKASSRTAPVGSWMRQASRRSTSNSSRSETPPSLPHLFSTSLMKTRTGELSSPSSSRRCR

SEQ ID NO: 21221 - protein, 589 aa, Artificial Sequence
  Synthetic polypeptide
DWASAIRVAALDCMEEKNQAVCHDYDIHFYPTFRYFKAFTKEFTTGENFKGPDRELRTVRQTMIDFLQNHTEGSRPPACPRLDPIQPSDVLSLLDNRGSHYVAIVFESNSSYLGREVILDLIPYESIVVTRALDGDKAFLEKLGVSSVPSCYLIYPNGSHGLINVVKPLRAFFSSYLKSLPDVRKKSLPLPEKPHKEENSEIVVWREFDKSKLYTVDLESGLHYLLRVELAAHKSLAGAELKTLKDFVTVLAKLFPGRPPVKKLLEMLQEWLASLPLDRIPYNAVLDLVNNKMRISGIFLTNHIKWVGCQGSRSELRGYPCSLWKLFHTLTVEASTHPDALVGTGFEDDPQAVLQTMRRYVHTFFGCKECGEHFEEMAKESMDSVKTPDQAILWLWKKHNMVNGRLAGHLSEDPRFPKLQWPTPDLCPACHEEIKGLASWDEGHVLTFLKQHYGRDNLLDTYSADQGDSSEGGTLARGEEEEKRLTPPEVSHGDRDTQSVRPPGALGPRPALPESLHHSLDGKLQSLDGPGAHKEVGGAAPFLGVDFSSLDMSLCVVLYVASSLFLMVMYFFFRVRSRRWKVKHHHPAV

SEQ ID NO: 21222 - protein, 50 aa, Artificial Sequence; identical to SEQ ID NO: 5181
  Synthetic polypeptide

SEQ ID NO: 21223 - protein, 69 aa, Artificial Sequence; identical to SEQ ID NO: 4244
  Synthetic polypeptide

SEQ ID NO: 21224 - protein, 86 aa, Artificial Sequence
  Synthetic polypeptide
ALTAQPQRFLQTATRSARKTAGPQITTFLSTSFPYNVDERKKTGFVMCPSPSSHRFQEPVSDTKLGQCHSRRSSGLHGREEPGRVP

SEQ ID NO: 21225 - protein, 64 aa, Artificial Sequence
  Synthetic polypeptide
HETGPVPFASQLWTAWKRRTRPCAMTTTSTSTPPSGILKHLQRSLQLEKILKDLTESCEQSDRR

SEQ ID NO: 21226 - protein, 627 aa, Artificial Sequence
  Synthetic polypeptide
RHFCQRHFLITWMREKKLVLLCVLPLQATVSRSLSVTRNWASAIRVAALDCMEEKNQAVCHDYDIHFYPTFRYFKAFTKEFTTGENFKGPDRELRTVRQTMIDFLQNHTEGSRPPACPRLDPIQPSDVLSLLDNRGSHYVAIVFESNSSYLGREVILDLIPYESIVVTRALDGDKAFLEKLGVSSVPSCYLIYPNGSHGLINVVKPLRAFFSSYLKSLPDVRKKSLPLPEKPHKEENSEIVVWREFDKSKLYTVDLESGLHYLLRVELAAHKSLAGAELKTLKDFVTVLAKLFPGRPPVKKLLEMLQEWLASLPLDRIPYNAVLDLVNNKMRISGIFLTNHIKWVGCQGSRSELRGYPCSLWKLFHTLTVEASTHPDALVGTGFEDDPQAVLQTMRRYVHTFFGCKECGEHFEEMAKESMDSVKTPDQAILWLWKKHNMVNGRLAGHLSEDPRFPKLQWPTPDLCPACHEEIKGLASWDEGHVLTFLKQHYGRDNLLDTYSADQGDSSEGGTLARGEEEEKRLTPPEVSHGDRDTQSVRPPGALGPRPALPESLHHSLDGKLQSLDGPGAHKEVGGAAPFLGVDFSSLDMSLCVVLYVASSLFLMVMYFFFRVRSRRWKVKHHHPAV

SEQ ID NO: 21227 - protein, 603 aa, Artificial Sequence
  Synthetic polypeptide
AGAVAPACNPGTLEDWASAIRVAALDCMEEKNQAVCHDYDIHFYPTFRYFKAFTKEFTTGENFKGPDRELRTVRQTMIDFLQNHTEGSRPPACPRLDPIQPSDVLSLLDNRGSHYVAIVFESNSSYLGREVILDLIPYESIVVTRALDGDKAFLEKLGVSSVPSCYLIYPNGSHGLINVVKPLRAFFSSYLKSLPDVRKKSLPLPEKPHKEENSEIVVWREFDKSKLYTVDLESGLHYLLRVELAAHKSLAGAELKTLKDFVTVLAKLFPGRPPVKKLLEMLQEWLASLPLDRIPYNAVLDLVNNKMRISGIFLTNHIKWVGCQGSRSELRGYPCSLWKLFHTLTVEASTHPDALVGTGFEDDPQAVLQTMRRYVHTFFGCKECGEHFEEMAKESMDSVKTPDQAILWLWKKHNMVNGRLAGHLSEDPRFPKLQWPTPDLCPACHEEIKGLASWDEGHVLTFLKQHYGRDNLLDTYSADQGDSSEGGTLARGEEEEKRLTPPEVSHGDRDTQSVRPPGALGPRPALPESLHHSLDGKLQSLDGPGAHKEVGGAAPFLGVDFSSLDMSLCVVLYVASSLFLMVMYFFFRVRSRRWKVKHHHPAV

SEQ ID NO: 21228 - protein, 76 aa, Artificial Sequence
  Synthetic polypeptide
PGQWLPPVIPVLWKTGPVPFASQLWTAWKRRTRPCAMTTTSTSTPPSGILKHLQRSLQLEKILKDLTESCEQSDRR

SEQ ID NO: 21229 - protein, 28 aa, Artificial Sequence
  Synthetic polypeptide
SRYFGRLGQCHSRRSSGLHGREEPGRVP

SEQ ID NO: 21230 - protein, 599 aa, Artificial Sequence
  Synthetic polypeptide
AGAVAPACNPDWASAIRVAALDCMEEKNQAVCHDYDIHFYPTFRYFKAFTKEFTTGENFKGPDRELRTVRQTMIDFLQNHTEGSRPPACPRLDPIQPSDVLSLLDNRGSHYVAIVFESNSSYLGREVILDLIPYESIVVTRALDGDKAFLEKLGVSSVPSCYLIYPNGSHGLINVVKPLRAFFSSYLKSLPDVRKKSLPLPEKPHKEENSEIVVWREFDKSKLYTVDLESGLHYLLRVELAAHKSLAGAELKTLKDFVTVLAKLFPGRPPVKKLLEMLQEWLASLPLDRIPYNAVLDLVNNKMRISGIFLTNHIKWVGCQGSRSELRGYPCSLWKLFHTLTVEASTHPDALVGTGFEDDPQAVLQTMRRYVHTFFGCKECGEHFEEMAKESMDSVKTPDQAILWLWKKHNMVNGRLAGHLSEDPRFPKLQWPTPDLCPACHEEIKGLASWDEGHVLTFLKQHYGRDNLLDTYSADQGDSSEGGTLARGEEEEKRLTPPEVSHGDRDTQSVRPPGALGPRPALPESLHHSLDGKLQSLDGPGAHKEVGGAAPFLGVDFSSLDMSLCVVLYVASSLFLMVMYFFFRVRSRRWKVKHHHPAV

SEQ ID NO: 21231 - protein, 72 aa, Artificial Sequence
  Synthetic polypeptide
PGQWLPPVIPTGPVPFASQLWTAWKRRTRPCAMTTTSTSTPPSGILKHLQRSLQLEKILKDLTESCEQSDRR

SEQ ID NO: 21232 - protein, 24 aa, Artificial Sequence
  Synthetic polypeptide
SRLGQCHSRRSSGLHGREEPGRVP

SEQ ID NO: 21233 - protein, 237 aa, Artificial Sequence
  Synthetic polypeptide
CQHLQVFLGFGAKKSPCQEQPPTNDCKTKYTLIDEQDIPLVESYSFEARMEVDADGNGAKIFAYAFDKNRGRGSGRLLHELLWERHRGGVAPGFQVVHLNAVTVDNRLDNLQLVPWGWRPKAEETSSKQREQSLYWLAIQQLPTDPIEEQFPVLNVTRYYNANGDVVEEEENSCTYYECHYPPCTVIEKQLREFNICGRCQVARYCGSQCQQKDWPAHKKHCRERKRPFQHELEPER

SEQ ID NO: 21234 - protein, 9 aa, Artificial Sequence
  Synthetic polypeptide
LQDQIHADR

SEQ ID NO: 21235 - protein, 31 aa, Artificial Sequence
  Synthetic polypeptide
VNTCRSFSALEPRSHLARNSLQPMTARPNTR

SEQ ID NO: 21236 - protein, 84 aa, Artificial Sequence
  Synthetic polypeptide
FIVLILTATPAFSSHHPGQSEAVNLEDTTSIEKMSNCCEDISRPRKPWQQTFSEVFGTRWKILWFIPFRQRQPLRVPYHFANHV

SEQ ID NO: 21237 - protein, 78 aa, Artificial Sequence
  Synthetic polypeptide
QPPQPSAATTLANQKLSTWRIQHLLKRCQTVVKIYRGPESHGSRPSQKFLALVGRSCGSFLSGRGNHCEFPTTLPIMS

SEQ ID NO: 21238 - protein, 31 aa, Artificial Sequence
  Synthetic polypeptide
VYCFNFDSHPSLQQPPPWPIRSCQLGGYNIY

SEQ ID NO: 21239 - protein, 14 aa, Artificial Sequence
  Synthetic polypeptide
GLTLCHKWKILHDF

SEQ ID NO: 21240 - protein, 36 aa, Artificial Sequence
  Synthetic polypeptide
HYATSGKFYTIFKKSRSCLCKILYPFIQNTDFYSFH

SEQ ID NO: 21241 - protein, 1371 aa, Artificial Sequence
  Synthetic polypeptide
NFLRADIMPQVENSTRFLKSRDRAYAKFYTLLSKTQIFIRFIEECSFVSDKDTGLAFFDDCIEKLFPDKGTEKTDKVDFDSAEDTRLIELDDSQKSEHTVFIMPPEPPPDDGKDLSPKYSYKYFPRLDLKLFDRPQELKLCFSRHPTGNSITKSPPLMAKRTKQEIKTAHKLAKRCYTNPPQWAKCLFSHCYSLWFICLPAYVRVSHPKVRALQQAYDVLIKMRKTDVDPLDEVCYRVVMQLCGLWGHPVLAVRVLFEMKTARIKPNAITYGYYNKVVLESPWPSSTRSGIFLWTKVRNVVRGLAQFRQPLKKTVQRSQVSSISALQNVTGGSDGDTVSHGSVDSSNDANNGEHTVFVRDLIRLESIDNHSSTGGQSDQGYGSKDELIKDDAEIHVPEEQAARELITKTKMQTEEVCDASAIVAKHSQPSPEPHSPTEPPAWGSSIVKVPSGIFDVNSRKSSTGSISNVLFSTQDPVEDAVFGEATNLKKNGDRGEKRQKHFPERSCSFSSESRAGMLLKKSSLDSNSSEMAIMMGADAKILTAALTCPKTSLLHIARTHSFENVSCHLPDSRTCMSESTWNPEHRSSPVPEMLEESQELLEPVVDDVPKTTATVDTYESLLSDSNSNQSRDLKTVSKDLRNKRSSLYGIAKVVQREDVETGLDPLSLLATECTGGKTPDSEDKLFSPVIARNLADEIESYMNLKSPLGSKSSSMELHREENRESGMTTAFIHALERRSSLPLDHGSPAQENPESEKSSPAVSRSKTFTGRFKQQTPSRTHKERSTSLSALVRSSPHGSLGSVVNSLSGLKLDNILSGPKIDVLKSGMKQAATVASKMWVAVASAYSYSDDEEETNRDYSFPAGLEDHILGENISPNTSISGLVPSELTQSNTSLGSSSSSGDVGKLHYPTGEVPFPRGMKGQDFEKSDHGSSQNTSMSSIYQNCAMEVLMSSCSQCRACGALVYDEEIMAGWTADDSNLNTACPFCKSNFLPLLNIEFKDLRGSASFFLKPSTSGDSLQSGSIPLANESLEHKPVSSLAEPDLINFMDFPKHNQIITEETGSAVEPSDEIKRASGDVQTMKISSVPNSLSKRNVSLTRSHSVGGPLQNIDFTQRPFHGISTVSLPNSLQEVVDPLGKRPNPPPVSVPYLSPLVLRKELESLLENEGDQVIHTSSFINQHPIIFWNLVWYFRRLDLPSNLPGLILTSEHCNEGVQLPLSSLSQDSKLVYIQLLWDNINLHQEPREPLYVSWRNFNSEKKSSLLSEEQQETSTLVETIRQSIQHNNVLKPINLLSQQMKPGMKRQRSLYREILFLSLVSLGRENIDIEAFDNEYGIAYNSLSSEILERLQKIDAPPSASVEWCRKCFGAPLI

SEQ ID NO: 21242 - protein, 1322 aa, Artificial Sequence
  Synthetic polypeptide
NFLRADIMPQVENSTRFLKSRDRAYAKFYTLLSKTQIFIRFIEECSFVSDKDTGLAFFDDCIEKLFPDKGTEKTDKVDFDSAEDTRLIELDDSQKSEHTVFIMPPEPPPDDGKDLSPKYSYKYFPRLDLKLFDRPQELKLCFSRHPTGNSITKSPPLMAKRTKQEIKTAHKLAKRCYTNPPQWAKCLFSHCYSLWFICLPAYVRVSHPKVRALQQAYDVLIKMRKTDVDPLDEVCYRVVMQLCGLWGHPVLAVRVLFEMKTARIKPNAITYGYYNKVVLESPWPSSTRSGIFLWTKVRNVVRGLAQFRQPLKKTVQRSQVSSISGGQSDQGYGSKDELIKDDAEIHVPEEQAARELITKTKMQTEEVCDASAIVAKHSQPSPEPHSPTEPPAWGSSIVKVPSGIFDVNSRKSSTGSISNVLFSTQDPVEDAVFGEATNLKKNGDRGEKRQKHFPERSCSFSSESRAGMLLKKSSLDSNSSEMAIMMGADAKILTAALTCPKTSLLHIARTHSFENVSCHLPDSRTCMSESTWNPEHRSSPVPEMLEESQELLEPVVDDVPKTTATVDTYESLLSDSNSNQSRDLKTVSKDLRNKRSSLYGIAKVVQREDVETGLDPLSLLATECTGGKTPDSEDKLFSPVIARNLADEIESYMNLKSPLGSKSSSMELHREENRESGMTTAFIHALERRSSLPLDHGSPAQENPESEKSSPAVSRSKTFTGRFKQQTPSRTHKERSTSLSALVRSSPHGSLGSVVNSLSGLKLDNILSGPKIDVLKSGMKQAATVASKMWVAVASAYSYSDDEEETNRDYSFPAGLEDHILGENISPNTSISGLVPSELTQSNTSLGSSSSSGDVGKLHYPTGEVPFPRGMKGQDFEKSDHGSSQNTSMSSIYQNCAMEVLMSSCSQCRACGALVYDEEIMAGWTADDSNLNTACPFCKSNFLPLLNIEFKDLRGSASFFLKPSTSGDSLQSGSIPLANESLEHKPVSSLAEPDLINFMDFPKHNQIITEETGSAVEPSDEIKRASGDVQTMKISSVPNSLSKRNVSLTRSHSVGGPLQNIDFTQRPFHGISTVSLPNSLQEVVDPLGKRPNPPPVSVPYLSPLVLRKELESLLENEGDQVIHTSSFINQHPIIFWNLVWYFRRLDLPSNLPGLILTSEHCNEGVQLPLSSLSQDSKLVYIQLLWDNINLHQEPREPLYVSWRNFNSEKKSSLLSEEQQETSTLVETIRQSIQHNNVLKPINLLSQQMKPGMKRQRSLYREILFLSLVSLGRENIDIEAFDNEYGIAYNSLSSEILERLQKIDAPPSASVEWCRKCFGAPLI

SEQ ID NO: 21243 - protein, 26 aa, Artificial Sequence
  Synthetic polypeptide
FEGVLSSSDAALWTLGSSCFSSESLI

SEQ ID NO: 21244 - protein, 1147 aa, Artificial Sequence
  Synthetic polypeptide
HLHHKVSLKVCYRVVMQLCGLWGHPVLAVRVLFEMKTARIKPNAITYGYYNKVVLESPWPSSTRSGIFLWTKVRNVVRGLAQFRQPLKKTVQRSQVSSISALQNVTGGSDGDTVSHGSVDSSNDANNGEHTVFVRDLIRLESIDNHSSTGGQSDQGYGSKDELIKDDAEIHVPEEQAARELITKTKMQTEEVCDASAIVAKHSQPSPEPHSPTEPPAWGSSIVKVPSGIFDVNSRKSSTGSISNVLFSTQDPVEDAVFGEATNLKKNGDRGEKRQKHFPERSCSFSSESRAGMLLKKSSLDSNSSEMAIMMGADAKILTAALTCPKTSLLHIARTHSFENVSCHLPDSRTCMSESTWNPEHRSSPVPEMLEESQELLEPVVDDVPKTTATVDTYESLLSDSNSNQSRDLKTVSKDLRNKRSSLYGIAKVVQREDVETGLDPLSLLATECTGGKTPDSEDKLFSPVIARNLADEIESYMNLKSPLGSKSSSMELHREENRESGMTTAFIHALERRSSLPLDHGSPAQENPESEKSSPAVSRSKTFTGRFKQQTPSRTHKERSTSLSALVRSSPHGSLGSVVNSLSGLKLDNILSGPKIDVLKSGMKQAATVASKMWVAVASAYSYSDDEEETNRDYSFPAGLEDHILGENISPNTSISGLVPSELTQSNTSLGSSSSSGDVGKLHYPTGEVPFPRGMKGQDFEKSDHGSSQNTSMSSIYQNCAMEVLMSSCSQCRACGALVYDEEIMAGWTADDSNLNTACPFCKSNFLPLLNIEFKDLRGSASFFLKPSTSGDSLQSGSIPLANESLEHKPVSSLAEPDLINFMDFPKHNQIITEETGSAVEPSDEIKRASGDVQTMKISSVPNSLSKRNVSLTRSHSVGGPLQNIDFTQRPFHGISTVSLPNSLQEVVDPLGKRPNPPPVSVPYLSPLVLRKELESLLENEGDQVIHTSSFINQHPIIFWNLVWYFRRLDLPSNLPGLILTSEHCNEGVQLPLSSLSQDSKLVYIQLLWDNINLHQEPREPLYVSWRNFNSEKKSSLLSEEQQETSTLVETIRQSIQHNNVLKPINLLSQQMKPGMKRQRSLYREILFLSLVSLGRENIDIEAFDNEYGIAYNSLSSEILERLQKIDAPPSASVEWCRKCFGAPLI

SEQ ID NO: 21245 - protein, 1098 aa, Artificial Sequence
  Synthetic polypeptide
HLHHKVSLKVCYRVVMQLCGLWGHPVLAVRVLFEMKTARIKPNAITYGYYNKVVLESPWPSSTRSGIFLWTKVRNVVRGLAQFRQPLKKTVQRSQVSSISGGQSDQGYGSKDELIKDDAEIHVPEEQAARELITKTKMQTEEVCDASAIVAKHSQPSPEPHSPTEPPAWGSSIVKVPSGIFDVNSRKSSTGSISNVLFSTQDPVEDAVFGEATNLKKNGDRGEKRQKHFPERSCSFSSESRAGMLLKKSSLDSNSSEMAIMMGADAKILTAALTCPKTSLLHIARTHSFENVSCHLPDSRTCMSESTWNPEHRSSPVPEMLEESQELLEPVVDDVPKTTATVDTYESLLSDSNSNQSRDLKTVSKDLRNKRSSLYGIAKVVQREDVETGLDPLSLLATECTGGKTPDSEDKLFSPVIARNLADEIESYMNLKSPLGSKSSSMELHREENRESGMTTAFIHALERRSSLPLDHGSPAQENPESEKSSPAVSRSKTFTGRFKQQTPSRTHKERSTSLSALVRSSPHGSLGSVVNSLSGLKLDNILSGPKIDVLKSGMKQAATVASKMWVAVASAYSYSDDEEETNRDYSFPAGLEDHILGENISPNTSISGLVPSELTQSNTSLGSSSSSGDVGKLHYPTGEVPFPRGMKGQDFEKSDHGSSQNTSMSSIYQNCAMEVLMSSCSQCRACGALVYDEEIMAGWTADDSNLNTACPFCKSNFLPLLNIEFKDLRGSASFFLKPSTSGDSLQSGSIPLANESLEHKPVSSLAEPDLINFMDFPKHNQIITEETGSAVEPSDEIKRASGDVQTMKISSVPNSLSKRNVSLTRSHSVGGPLQNIDFTQRPFHGISTVSLPNSLQEVVDPLGKRPNPPPVSVPYLSPLVLRKELESLLENEGDQVIHTSSFINQHPIIFWNLVWYFRRLDLPSNLPGLILTSEHCNEGVQLPLSSLSQDSKLVYIQLLWDNINLHQEPREPLYVSWRNFNSEKKSSLLSEEQQETSTLVETIRQSIQHNNVLKPINLLSQQMKPGMKRQRSLYREILFLSLVSLGRENIDIEAFDNEYGIAYNSLSSEILERLQKIDAPPSASVEWCRKCFGAPLI

SEQ ID NO: 21246 - protein, 5 aa, Artificial Sequence
  Synthetic polypeptide
RCAIE

SEQ ID NO: 21247 - protein, 24 aa, Artificial Sequence
  Synthetic polypeptide
RKCGRPPPLKRAVRRVWERPRHCL

SEQ ID NO: 21248 - protein, 61 aa, Artificial Sequence
  Synthetic polypeptide
SYDPAVSLLDICPEERISVYQRDICTPMFIAALFTVTKTWTQPKYPSAEEWIKKMWQAPAT

SEQ ID NO: 21249 - protein, 406 aa, Artificial Sequence
  Synthetic polypeptide
VSISRRMDKENVAGPRHLNVLCDVSGKGPVTACDFDLRSLQPDKRLENLLQQVSAEDFEKQNEEARRTNRQAELFALYPSVDEEDAVEIRPVPECPKEHLGNRILVKLLTLKFEIEIEPLFASIALYDVKERKKISENFHCDLNSDQFKGFLRAHTPSVAASSQARSAVFSVTYPSSDIYLVVKIEKVLQQGEIGDCAEPYTVIKESDGGKSKEKIEKLKLQAESFCQRLGKYRMPFAWAPISLSSFFNVSTLEREVTDVDSVVGRSSVGERRTLAQSRRLSERALSLEENGVGSNFKTSTLSVSSFFKQEGDRLSDEDLFKFLADYKRSSSLQRRVKSIPGLLRLEISTAPEIINCCLTPEMLPVKPFPENRTRPHKEILEFPTREVYVPHTVYREVFQVSAVAH

SEQ ID NO: 21250 - protein, 1903 aa, Artificial Sequence
  Synthetic polypeptide
VSISRRMDKENVAGPRHLNVLCDVSGKGPVTACDFDLRSLQPDKRLENLLQQVSAEDFEKQNEEARRTNRQAELFALYPSVDEEDAVEIRPVPECPKEHLGNRILVKLLTLKFEIEIEPLFASIALYDVKERKKISENFHCDLNSDQFKGFLRAHTPSVAASSQARSAVFSVTYPSSDIYLVVKIEKVLQQGEIGDCAEPYTVIKESDGGKSKEKIEKLKLQAESFCQRLGKYRMPFAWAPISLSSFFNVSTLEREVTDVDSVVGRSSVGERRTLAQSRRLSERALSLEENGVGSNFKTSTLSVSSFFKQEGDRLSDEDLFKFLADYKRSSSLQRRVKSIPGLLRLEISTAPEIINCCLTPEMLPVKPFPENRTRPHKEILEFPTREVYVPHTVYRNLLYVYPQRLNFVNKLASARNITIKIQFMCGEDASNAMPVIFGKSSGPEFLQEVYTAVTYHNKSPDFYEEVKIKLPAKLTVNHHLLFTFYHISCQQKQGASVETLLGYSWLPILLNERLQTGSYCLPVALEKLPPNYSMHSAEKVPLQNPPIKWAEGHKGVFNIEVQAVSSVHTQDNHLEKFFTLCHSLESQVTFPIRVLDQKISEMALEHELKLSIICLNSSRLEPLVLFLHLVLDKLFQLSVQPMVIAGQTANFSQFAFESVVAIANSLHNSKDLSKDQHGRNCLLASYVHYVFRLPEVQRDVPKSGAPTALLDPRSYHTYGRTSAAAVSSKLLQARVMSSSNPDLAGTHSAADEEVKNIMSSKHFHEELALQMVVSTGMVRETVFKYAWFFFELLVKSMAQHVHNMDKRDSFRRTRFSDRFMDDITTIVNVVTSEIAALLVKPQKENEQAEKMNISLAFFLYDLLSLMDRGFVFNLIRHYCSQLSAKLSNLPTLISMRLEFLRILCSHEHYLNLNLFFMNADTAPTSPCPSISSQNSSSCSSFQDQKIASMFDLTSEYRQQHFLTGLLFTELAAALDAEGEGISKVQRKAVSAIHSLLSSHDLDPRCVKPEVKVKIAALYLPLVGIILDALPQLCDFTVADTRRYRTSGSDEEQEGAGAINQNVALAIAGNNFNLKTSGIVLSSLPYKQYNMLNADTTRNLMICFLWIMKNADQSLIRKWIADLPSTQLNRILDLLFICVLCFEYKGKQSSDKVSTQVLQKSRDVKARLEEALLRGEGARGEMMRRRAPGNDRFPGLNENLRWKKEQTHWRQANEKLDKTKAELDQEALISGNLATEAHLIILDMQENIIQASSALDCKDSLLGGVLRVLVNSLNCDQSTTYLTHCFATLRALIAKFGDLLFEEEVEQCFDLCHQVLHHCSSSMDVTRSQACATLYLLMRFSFGATSNFARVKMQVTMSLASLVGRAPDFNEEHLRRSLRTILAYSEEDTAMQMTPFPTQVEELLCNLNSILYDTVKMREFQEDPEMLMDLMYRIAKSYQASPDLRLTWLQNMAEKHTKKKCYTEAAMCLVHAAALVAEYLSMLEDHSYLPVGSVSFQNISSNVLEESVVSEDTLSPDEDGVCAGQYFTESGLVGLLEQAAELFSTGGLYETVNEVYKLVIPILEAHREFRKLTLTHSKLQRAFDSIVNKDHKRMFGTYFRVGFFGSKFGDLDEQEFVYKEPAITKLPEISHRLEAFYGQCFGAEFVEVIKDSTPVDKTKLDPNKAYIQITFVEPYFDEYEMKDRVTYFEKNFNLRRFMYTTPFTLEGRPRGELHEQYRRNTVLTTMHAFPYIKTRISVIQKEEFVLTPIEVAIEDMKKKTLQLAVAINQEPPDAKMLQMVLQGSVGATVNQGPLEVAQVFLAEIPADPKLYRHHNKLRLCFKEFIMRCGEAVEKNKRLITADQREYQQELKKNYNKLKENLRPMIERKIPELYKPIFRVESQKRDSFHRSSFRKCETQLSQGS

SEQ ID NO: 21251 - protein, 1935 aa, Artificial Sequence
  Synthetic polypeptide
VSISRRMDKENVAGPRHLNVLCDVSGKGPVTACDFDLRSLQPDKRLENLLQQVSAEDFEKQNEEARRTNRQAELFALYPSVDEEDAVEIRPVPECPKEHLGNRILVKLLTLKFEIEIEPLFASIALYDVKERKKISENFHCDLNSDQFKGFLRAHTPSVAASSQARSAVFSVTYPSSDIYLVVKIEKVLQQGEIGDCAEPYTVIKESDGGKSKEKIEKLKLQAESFCQRLGKYRMPFAWAPISLSSFFNVSTLEREVTDVDSVVGRSSVGERRTLAQSRRLSERALSLEENGVGSNFKTSTLSVSSFFKQEGDRLSDEDLFKFLADYKRSSSLQRRVKSIPGLLRLEISTAPEIINCCLTPEMLPVKPFPENRTRPHKEILEFPTREVYVPHTVYRNLLYVYPQRLNFVNKLASARNITIKIQFMCGEDASNAMPVIFGKSSGPEFLQEVYTAVTYHNKSPDFYEEVKIKLPAKLTVNHHLLFTFYHISCQQKQGASVETLLGYSWLPILLNERLQTGSYCLPVALEKLPPNYSMHSAEKVPLQNPPIKWAEGHKGVFNIEVQAVSSVHTQDNHLEKFFTLCHSLESQVTFPIRVLDQKISEMALEHELKLSIICLNSSRLEPLVLFLHLVLDKLFQLSVQPMVIAGQTANFSQFAFESVVAIANSLHNSKDLSKDQHGRNCLLASYVHYVFRLPEVQRDVPKSGAPTALLDPRSYHTYGRTSAAAVSSKLLQARVMSSSNPDLAGTHSAADEEVKNIMSSKIADRNCSRMSYYCSGSSDAPSSPAAPRPASKKHFHEELALQMVVSTGMVRETVFKYAWFFFELLVKSMAQHVHNMDKRDSFRRTRFSDRFMDDITTIVNVVTSEIAALLVKPQKENEQAEKMNISLAFFLYDLLSLMDRGFVFNLIRHYCSQLSAKLSNLPTLISMRLEFLRILCSHEHYLNLNLFFMNADTAPTSPCPSISSQNSSSCSSFQDQKIASMFDLTSEYRQQHFLTGLLFTELAAALDAEGEGISKVQRKAVSAIHSLLSSHDLDPRCVKPEVKVKIAALYLPLVGIILDALPQLCDFTVADTRRYRTSGSDEEQEGAGAINQNVALAIAGNNFNLKTSGIVLSSLPYKQYNMLNADTTRNLMICFLWIMKNADQSLIRKWIADLPSTQLNRILDLLFICVLCFEYKGKQSSDKVSTQVLQKSRDVKARLEEALLRGEGARGEMMRRRAPGNDRFPGLNENLRWKKEQTHWRQANEKLDKTKAELDQEALISGNLATEAHLIILDMQENIIQASSALDCKDSLLGGVLRVLVNSLNCDQSTTYLTHCFATLRALIAKFGDLLFEEEVEQCFDLCHQVLHHCSSSMDVTRSQACATLYLLMRFSFGATSNFARVKMQVTMSLASLVGRAPDFNEEHLRRSLRTILAYSEEDTAMQMTPFPTQVEELLCNLNSILYDTVKMREFQEDPEMLMDLMYRIAKSYQASPDLRLTWLQNMAEKHTKKKCYTEAAMCLVHAAALVAEYLSMLEDHSYLPVGSVSFQNISSNVLEESVVSEDTLSPDEDGVCAGQYFTESGLVGLLEQAAELFSTGGLYETVNEVYKLVIPILEAHREFRKLTLTHSKLQRAFDSIVNKDHKRMFGTYFRVGFFGSKFGDLDEQEFVYKEPAITKLPEISHRLEAFYGQCFGAEFVEVIKDSTPVDKTKLDPNKAYIQITFVEPYFDEYEMKDRVTYFEKNFNLRRFMYTTPFTLEGRPRGELHEQYRRNTVLTTMHAFPYIKTRISVIQKEEFVLTPIEVAIEDMKKKTLQLAVAINQEPPDAKMLQMVLQGSVGATVNQGPLEVAQVFLAEIPADPKLYRHHNKLRLCFKEFIMRCGEAVEKNKRLITADQREYQQELKKNYNKLKENLRPMIERKIPELYKPIFRVESQKRDSFHRSSFRKCETQLSQGS

SEQ ID NO: 21252 - protein, 29 aa, Artificial Sequence
  Synthetic polypeptide
FDHYTLYTGRPPPLKRAVRRVWERPRHCL

SEQ ID NO: 21253 - protein, 411 aa, Artificial Sequence
  Synthetic polypeptide
GNGYTNYPDLIITHCTQAGPRHLNVLCDVSGKGPVTACDFDLRSLQPDKRLENLLQQVSAEDFEKQNEEARRTNRQAELFALYPSVDEEDAVEIRPVPECPKEHLGNRILVKLLTLKFEIEIEPLFASIALYDVKERKKISENFHCDLNSDQFKGFLRAHTPSVAASSQARSAVFSVTYPSSDIYLVVKIEKVLQQGEIGDCAEPYTVIKESDGGKSKEKIEKLKLQAESFCQRLGKYRMPFAWAPISLSSFFNVSTLEREVTDVDSVVGRSSVGERRTLAQSRRLSERALSLEENGVGSNFKTSTLSVSSFFKQEGDRLSDEDLFKFLADYKRSSSLQRRVKSIPGLLRLEISTAPEIINCCLTPEMLPVKPFPENRTRPHKEILEFPTREVYVPHTVYREVFQVSAVAH

SEQ ID NO: 21254 - protein, 1908 aa, Artificial Sequence
  Synthetic polypeptide
GNGYTNYPDLIITHCTQAGPRHLNVLCDVSGKGPVTACDFDLRSLQPDKRLENLLQQVSAEDFEKQNEEARRTNRQAELFALYPSVDEEDAVEIRPVPECPKEHLGNRILVKLLTLKFEIEIEPLFASIALYDVKERKKISENFHCDLNSDQFKGFLRAHTPSVAASSQARSAVFSVTYPSSDIYLVVKIEKVLQQGEIGDCAEPYTVIKESDGGKSKEKIEKLKLQAESFCQRLGKYRMPFAWAPISLSSFFNVSTLEREVTDVDSVVGRSSVGERRTLAQSRRLSERALSLEENGVGSNFKTSTLSVSSFFKQEGDRLSDEDLFKFLADYKRSSSLQRRVKSIPGLLRLEISTAPEIINCCLTPEMLPVKPFPENRTRPHKEILEFPTREVYVPHTVYRNLLYVYPQRLNFVNKLASARNITIKIQFMCGEDASNAMPVIFGKSSGPEFLQEVYTAVTYHNKSPDFYEEVKIKLPAKLTVNHHLLFTFYHISCQQKQGASVETLLGYSWLPILLNERLQTGSYCLPVALEKLPPNYSMHSAEKVPLQNPPIKWAEGHKGVFNIEVQAVSSVHTQDNHLEKFFTLCHSLESQVTFPIRVLDQKISEMALEHELKLSIICLNSSRLEPLVLFLHLVLDKLFQLSVQPMVIAGQTANFSQFAFESVVAIANSLHNSKDLSKDQHGRNCLLASYVHYVFRLPEVQRDVPKSGAPTALLDPRSYHTYGRTSAAAVSSKLLQARVMSSSNPDLAGTHSAADEEVKNIMSSKHFHEELALQMVVSTGMVRETVFKYAWFFFELLVKSMAQHVHNMDKRDSFRRTRFSDRFMDDITTIVNVVTSEIAALLVKPQKENEQAEKMNISLAFFLYDLLSLMDRGFVFNLIRHYCSQLSAKLSNLPTLISMRLEFLRILCSHEHYLNLNLFFMNADTAPTSPCPSISSQNSSSCSSFQDQKIASMFDLTSEYRQQHFLTGLLFTELAAALDAEGEGISKVQRKAVSAIHSLLSSHDLDPRCVKPEVKVKIAALYLPLVGIILDALPQLCDFTVADTRRYRTSGSDEEQEGAGAINQNVALAIAGNNFNLKTSGIVLSSLPYKQYNMLNADTTRNLMICFLWIMKNADQSLIRKWIADLPSTQLNRILDLLFICVLCFEYKGKQSSDKVSTQVLQKSRDVKARLEEALLRGEGARGEMMRRRAPGNDRFPGLNENLRWKKEQTHWRQANEKLDKTKAELDQEALISGNLATEAHLIILDMQENIIQASSALDCKDSLLGGVLRVLVNSLNCDQSTTYLTHCFATLRALIAKFGDLLFEEEVEQCFDLCHQVLHHCSSSMDVTRSQACATLYLLMRFSFGATSNFARVKMQVTMSLASLVGRAPDFNEEHLRRSLRTILAYSEEDTAMQMTPFPTQVEELLCNLNSILYDTVKMREFQEDPEMLMDLMYRIAKSYQASPDLRLTWLQNMAEKHTKKKCYTEAAMCLVHAAALVAEYLSMLEDHSYLPVGSVSFQNISSNVLEESVVSEDTLSPDEDGVCAGQYFTESGLVGLLEQAAELFSTGGLYETVNEVYKLVIPILEAHREFRKLTLTHSKLQRAFDSIVNKDHKRMFGTYFRVGFFGSKFGDLDEQEFVYKEPAITKLPEISHRLEAFYGQCFGAEFVEVIKDSTPVDKTKLDPNKAYIQITFVEPYFDEYEMKDRVTYFEKNFNLRRFMYTTPFTLEGRPRGELHEQYRRNTVLTTMHAFPYIKTRISVIQKEEFVLTPIEVAIEDMKKKTLQLAVAINQEPPDAKMLQMVLQGSVGATVNQGPLEVAQVFLAEIPADPKLYRHHNKLRLCFKEFIMRCGEAVEKNKRLITADQREYQQELKKNYNKLKENLRPMIERKIPELYKPIFRVESQKRDSFHRSSFRKCETQLSQGS

SEQ ID NO: 21255 - protein, 1940 aa, Artificial Sequence
  Synthetic polypeptide
GNGYTNYPDLIITHCTQAGPRHLNVLCDVSGKGPVTACDFDLRSLQPDKRLENLLQQVSAEDFEKQNEEARRTNRQAELFALYPSVDEEDAVEIRPVPECPKEHLGNRILVKLLTLKFEIEIEPLFASIALYDVKERKKISENFHCDLNSDQFKGFLRAHTPSVAASSQARSAVFSVTYPSSDIYLVVKIEKVLQQGEIGDCAEPYTVIKESDGGKSKEKIEKLKLQAESFCQRLGKYRMPFAWAPISLSSFFNVSTLEREVTDVDSVVGRSSVGERRTLAQSRRLSERALSLEENGVGSNFKTSTLSVSSFFKQEGDRLSDEDLFKFLADYKRSSSLQRRVKSIPGLLRLEISTAPEIINCCLTPEMLPVKPFPENRTRPHKEILEFPTREVYVPHTVYRNLLYVYPQRLNFVNKLASARNITIKIQFMCGEDASNAMPVIFGKSSGPEFLQEVYTAVTYHNKSPDFYEEVKIKLPAKLTVNHHLLFTFYHISCQQKQGASVETLLGYSWLPILLNERLQTGSYCLPVALEKLPPNYSMHSAEKVPLQNPPIKWAEGHKGVFNIEVQAVSSVHTQDNHLEKFFTLCHSLESQVTFPIRVLDQKISEMALEHELKLSIICLNSSRLEPLVLFLHLVLDKLFQLSVQPMVIAGQTANFSQFAFESVVAIANSLHNSKDLSKDQHGRNCLLASYVHYVFRLPEVQRDVPKSGAPTALLDPRSYHTYGRTSAAAVSSKLLQARVMSSSNPDLAGTHSAADEEVKNIMSSKIADRNCSRMSYYCSGSSDAPSSPAAPRPASKKHFHEELALQMVVSTGMVRETVFKYAWFFFELLVKSMAQHVHNMDKRDSFRRTRFSDRFMDDITTIVNVVTSEIAALLVKPQKENEQAEKMNISLAFFLYDLLSLMDRGFVFNLIRHYCSQLSAKLSNLPTLISMRLEFLRILCSHEHYLNLNLFFMNADTAPTSPCPSISSQNSSSCSSFQDQKIASMFDLTSEYRQQHFLTGLLFTELAAALDAEGEGISKVQRKAVSAIHSLLSSHDLDPRCVKPEVKVKIAALYLPLVGIILDALPQLCDFTVADTRRYRTSGSDEEQEGAGAINQNVALAIAGNNFNLKTSGIVLSSLPYKQYNMLNADTTRNLMICFLWIMKNADQSLIRKWIADLPSTQLNRILDLLFICVLCFEYKGKQSSDKVSTQVLQKSRDVKARLEEALLRGEGARGEMMRRRAPGNDRFPGLNENLRWKKEQTHWRQANEKLDKTKAELDQEALISGNLATEAHLIILDMQENIIQASSALDCKDSLLGGVLRVLVNSLNCDQSTTYLTHCFATLRALIAKFGDLLFEEEVEQCFDLCHQVLHHCSSSMDVTRSQACATLYLLMRFSFGATSNFARVKMQVTMSLASLVGRAPDFNEEHLRRSLRTILAYSEEDTAMQMTPFPTQVEELLCNLNSILYDTVKMREFQEDPEMLMDLMYRIAKSYQASPDLRLTWLQNMAEKHTKKKCYTEAAMCLVHAAALVAEYLSMLEDHSYLPVGSVSFQNISSNVLEESVVSEDTLSPDEDGVCAGQYFTESGLVGLLEQAAELFSTGGLYETVNEVYKLVIPILEAHREFRKLTLTHSKLQRAFDSIVNKDHKRMFGTYFRVGFFGSKFGDLDEQEFVYKEPAITKLPEISHRLEAFYGQCFGAEFVEVIKDSTPVDKTKLDPNKAYIQITFVEPYFDEYEMKDRVTYFEKNFNLRRFMYTTPFTLEGRPRGELHEQYRRNTVLTTMHAFPYIKTRISVIQKEEFVLTPIEVAIEDMKKKTLQLAVAINQEPPDAKMLQMVLQGSVGATVNQGPLEVAQVFLAEIPADPKLYRHHNKLRLCFKEFIMRCGEAVEKNKRLITADQREYQQELKKNYNKLKENLRPMIERKIPELYKPIFRVESQKRDSFHRSSFRKCETQLSQGS

SEQ ID NO: 21256 - protein, 12 aa, Artificial Sequence
  Synthetic polypeptide
SLHIVHRQAPAT

SEQ ID NO: 21257 - protein, 58 aa, Artificial Sequence; identical to SEQ ID NO: 4782
  Synthetic polypeptide

SEQ ID NO: 21258 - protein, 21 aa, Artificial Sequence
  Synthetic polypeptide
VEDRQLWSGCHIGGRHYIQSC

SEQ ID NO: 21259 - protein, 80 aa, Artificial Sequence
  Synthetic polypeptide
GMIIKMLNYPVQQALTRQNKQDVWLWLRGPGCAQPGHPRWFPHHQPGLWLCCHSGHPHRWPGLWGPPEPCRDLCHVLPGS

SEQ ID NO: 21260 - protein, 262 aa, Artificial Sequence
  Synthetic polypeptide
PVRINKMFGCGSVAQVVLSRGTHGGFLTINLAFGFAVTLGILIAGQVSGAHLNPAVTFAMCFLAREPWIKLPIYTLAQTLGAFLGAGIVFGLYYDAIWHFADNQLFVSGPNGTAGIFATYPSGHLDMINGFFDQFIGTASLIVCVLAIVDPYNNPVPRGLEAFTVGLVVLVIGTSMGFNSGYAVNPARDFGPRLFTALAGWGSAVFTTGQHWWWVPIVSPLLGSIAGVFVYQLMIGCHLEQPPPSNEEENVKLAHVKHKEQI

SEQ ID NO: 21261 - protein, 47 aa, Artificial Sequence
  Synthetic polypeptide
TRCLAVAPWPRLCSAGAPTVVSSPSTWPLALLSLWASSSLARSLGPT

SEQ ID NO: 21262 - protein, 828 aa, Artificial Sequence
  Synthetic polypeptide
FLKVVYICGPLEMLHEILLQAQRENLTNGDYVFFYLDVFGESLRAGPTRATGRPWQDNRTREQAQALREAFQTVLVITYREPPNPEYQEFQNRLLIRAREDFGVELGPSLMNLIAGCFYDGILLYAEVLNETIQEGGTREDGLRIVEKMQGRRYHGVTGLVVMDKNNDRETDFVLWAMGDLDSGDFQPAAHYSGAEKQIWWTGRPIPWVKGAPPSDNPPCAFDLDDPSCDKTPLSTLAIVALGTGITFIMFGVSSFLIFRKLMLEKELASMLWRIRWEELQFGNSERYHKGAGSRLTLSLRGSSYGSLMTAHGKYQIFANTGHFKGNVVAIKHVNKKRIELTRQVLFELKHMRDVQFNHLTRFIGACIDPPNICIVTEYCPRGSLQDILENDSINLDWMFRYSLINDLVKGMAFLHNSIISSHGSLKSSNCVVDSRFVLKITDYGLASFRSTAEPDDSHALYAKKLWTAPELLSGNPLPTTGMQKADVYSFGIILQEIALRSGPFYLEGLDLSPKEIVQKVRNGQRPYFRPSIDRTQLNEELVLLMERCWAQDPAERPDFGQIKGFIRRFNKEGGTSILDNLLLRMEQYANNLEKLVEERTQAYLEEKRKAEALLYQILPHSVAEQLKRGETVQAEAFDSVTIYFSDIVGFTALSAESTPMQVVTLLNDLYTCFDAIIDNFDVYKVETIGDAYMVVSGLPGRNGQRHAPEIARMALALLDAVSSFRIRHRPHDQLRLRIGVHTGPVCAGVVGLKMPRYCLFGDTVNTASRMESNGQALKIHVSSTTKDALDELGCFQLELRGDVEMKGKGKMRTYWLLGERKGPPGLL

SEQ ID NO: 21263 - protein, 25 aa, Artificial Sequence
  Synthetic polypeptide
SSKLCISAALWRCCMRSCFRPRGRI

SEQ ID NO: 21264 - protein, 15 aa, Artificial Sequence
  Synthetic polypeptide
VPQSCVYLRPSGDAA

SEQ ID NO: 21265 - protein, 931 aa, Artificial Sequence
  Synthetic polypeptide
HSIHGFYRLSYLQIFSSKSESRLKHLLQRAPDYCPETMVEIWNCMNSSLPGVFKKSDGWVGLGCCELAIALECRQACKQASSKNDISKVCRKEYENALFSCISRNEMGSVCCSYAGHHTNCREYCQAIFRTDSSPGPSQIKAVENYCASISPQLIHCVNNYTQSYPMRNPTDSLYCCDRAEDHACQNACKRILMSKKTEMEIVDGLIEGCKTQPLPQDPLWQCFLESSQSVHPGVTVHPPPSTGLDGAKLHCCSKANTSTCRELCTKLYSMSWGNTQSWQEFDRFCEYNPVEVSMLTCLADVREPCQLGCRNLTYCTNFNNRPTELFRSCNAQSDQGAMNDMKLWEKGSIKMPFINIPVLDIKKCQPEMWKAIACSLQIKPCHSKSRGSIICKSDCVEILKKCGDQNKFPEDHTAESICELLSPTDDLKNCIPLDTYLRPSTLGNIVEEVTHPCNPNPCPANELCEVNRKGCPSGDPCLPYFCVQGCKLGEASDFIVRQGTLIQVPSSAGEVGCYKICSCGQSGLLENCMEMHCIDLQKSCIVGGKRKSHGTSFSIDCNVCSCFAGNLVCSTRLCLSEHSSEDDRRTFTGLPCNCADQFVPVCGQNGRTYPSACIARCVGLQDHQFEFGSCMSKDPCNPNPCQKNQRCIPKPQVCLTTFDKFGCSQYECVPRQLACDQVQDPVCDTDHMEHNNLCTLYQRGKSLSYKGPCQPFCRATEPVCGHNGETYSSVCAAYSDRVAVDYYGDCQAVGVLSEHSSVAECASVKCPSLLAAGCKPIIPPGACCPLCAGMLRVLFDKEKLDTIAKVTNKKPITVLEILQKIRMHVSVPQCDVFGYFSIESEIVILIIPVDHYPKALQIEACNKEAEKIESLINSDSPTLASHVPLSALIISQVQVSSSVPSAGVRARPSCHSLLLPLSLGLALHLLWTYN

SEQ ID NO: 21266 - protein, 17 aa, Artificial Sequence
  Synthetic polypeptide
HSWILPSQLFADFLLKK

SEQ ID NO: 21267 - protein, 22 aa, Artificial Sequence
  Synthetic polypeptide
IAFMDFTVSAICRFSPQKVNPD

SEQ ID NO: 21268 - protein, 83 aa, Artificial Sequence
  Synthetic polypeptide
ARCFSSLDLSFFLYELKVCPVTVQISLSLYVGRMGALTPVPALLAVWASKTISLSLDHACQRIHVILIPAKKTKGAYPNHRSA

SEQ ID NO: 21269 - protein, 344 aa, Artificial Sequence
  Synthetic polypeptide
IEGLPCNCADQFVPVCGQNGRTYPSACIARCVGLQDHQFEFGSCMSKDPCNPNPCQKNQRCIPKPQVCLTTFDKFGCSQYECVPRQLACDQVQDPVCDTDHMEHNNLCTLYQRGKSLSYKGPCQPFCRATEPVCGHNGETYSSVCAAYSDRVAVDYYGDCQAVGVLSEHSSVAECASVKCPSLLAAGCKPIIPPGACCPLCAGMLRVLFDKEKLDTIAKVTNKKPITVLEILQKIRMHVSVPQCDVFGYFSIESEIVILIIPVDHYPKALQIEACNKEAEKIESLINSDSPTLASHVPLSALIISQVQVSSSVPSAGVRARPSCHSLLLPLSLGLALHLLWTYN

SEQ ID NO: 21270 - protein, 4 aa, Artificial Sequence
  Synthetic polypeptide
RSAL

SEQ ID NO: 21271 - protein, 10 aa, Artificial Sequence
  Synthetic polypeptide
KGAYPNHRSA

SEQ ID NO: 21272 - protein, 16 aa, Artificial Sequence
  Synthetic polypeptide
TFEKVHTQTTGLPDDF

SEQ ID NO: 21273 - protein, 331 aa, Artificial Sequence
  Synthetic polypeptide
YKEPLQIHLRKINLISKWTEINNLIEKWTKDINIKKEIQMVLKHLKRCIPKPQVCLTTFDKFGCSQYECVPRQLACDQVQDPVCDTDHMEHNNLCTLYQRGKSLSYKGPCQPFCRATEPVCGHNGETYSSVCAAYSDRVAVDYYGDCQAVGVLSEHSSVAECASVKCPSLLAAGCKPIIPPGACCPLCAGMLRVLFDKEKLDTIAKVTNKKPITVLEILQKIRMHVSVPQCDVFGYFSIESEIVILIIPVDHYPKALQIEACNKEAEKIESLINSDSPTLASHVPLSALIISQVQVSSSVPSAGVRARPSCHSLLLPLSLGLALHLLWTYN

SEQ ID NO: 21274 - protein, 24 aa, Artificial Sequence
  Synthetic polypeptide
APRFTSPVPWIRYLTFPTRGFLLQ

SEQ ID NO: 21275 - protein, 35 aa, Artificial Sequence
  Synthetic polypeptide
PALYQPCSLDKIFDLSDPRFSSPVICPGSKRRLRP

SEQ ID NO: 21276 - protein, 564 aa, Artificial Sequence
  Synthetic polypeptide
PFRPAVFFSSDLPRIKTEIEALKNLRHQHICQLYHVLETANKIFMVLEENLLFDEYHKLKLIDFGLCAKPKGNKDYHLQTCCGSLAYAAPELIQGKSYLGSEADVWSMGILLYVLMCGFLPFDDDNVMALYKKIMRGKYDVPKWLSPSSILLLQQMLQVDPKKRISMKNLLNHPWIMQDYNYPVEWQSKNPFIHLDDDCVTELSVHHRNNRQTMEDLISLWQYDHLTATYLLLLAKKARGKPVRLRLSSFSCGQASATPFTDIKSNNWSLEDVTASDKNYVAGLIDYDWCEDDLSTGAATPRTSQFTKYWTESNGVESKSLTPALCRTPANKLKNKENVYTPKSAVKNEEYFMFPEPKTPVNKNQHKREILTTPNRYTTPSKARNQCLKETPIKIPVNSTGTDKLMTGVISPERRCRSVELDLNQAHMEETPKRKGAKVFGSLERGLDKVITVLTRSKRKGSARDGPRRLKLHYNVTTTRLVNPDQLLNEIMSILPKKHVDFVQKGYTLKCQTQSDFGKVTMQFELEVCQLQKPDVVGIRRQRLKGDAWVYKRLVEDILSSCKV

SEQ ID NO: 21277 - protein, 541 aa, Artificial Sequence
  Synthetic polypeptide
PFRPAVFFSSDLPRIKTEIEALKNLRHQHICQLYHVLETANKIFMVLEGNKDYHLQTCCGSLAYAAPELIQGKSYLGSEADVWSMGILLYVLMCGFLPFDDDNVMALYKKIMRGKYDVPKWLSPSSILLLQQMLQVDPKKRISMKNLLNHPWIMQDYNYPVEWQSKNPFIHLDDDCVTELSVHHRNNRQTMEDLISLWQYDHLTATYLLLLAKKARGKPVRLRLSSFSCGQASATPFTDIKSNNWSLEDVTASDKNYVAGLIDYDWCEDDLSTGAATPRTSQFTKYWTESNGVESKSLTPALCRTPANKLKNKENVYTPKSAVKNEEYFMFPEPKTPVNKNQHKREILTTPNRYTTPSKARNQCLKETPIKIPVNSTGTDKLMTGVISPERRCRSVELDLNQAHMEETPKRKGAKVFGSLERGLDKVITVLTRSKRKGSARDGPRRLKLHYNVTTTRLVNPDQLLNEIMSILPKKHVDFVQKGYTLKCQTQSDFGKVTMQFELEVCQLQKPDVVGIRRQRLKGDAWVYKRLVEDILSSCKV

SEQ ID NO: 21278 - protein, 571 aa, Artificial Sequence
  Synthetic polypeptide
PFRPAVFFSSDLPRIKTEIEALKNLRHQHICQLYHVLETANKIFMVLEYCPGGELFDYIISQDRLSEEETRVVFRQIVSAVAYVHSQGYAHRDLKPENLLFDEYHKLKLIDFGLCAKPKGNKDYHLQTCCGSLAYAAPELIQGKSYLGSEADVWSMGILLYVLMCGFLPFDDDNVMALYKKIMRGKYDVPKWLSPSSILLLQQMLQVDPKKRISMKNLLNHPWIMQDYNYPVEWQSKNPFIHLDDDCVTELSVHHRNNRQTMEDLISLWQYDHLTATYLLLLAKKARGKPVRLRLSSFSCGQASATPFTDIKFTKYWTESNGVESKSLTPALCRTPANKLKNKENVYTPKSAVKNEEYFMFPEPKTPVNKNQHKREILTTPNRYTTPSKARNQCLKETPIKIPVNSTGTDKLMTGVISPERRCRSVELDLNQAHMEETPKRKGAKVFGSLERGLDKVITVLTRSKRKGSARDGPRRLKLHYNVTTTRLVNPDQLLNEIMSILPKKHVDFVQKGYTLKCQTQSDFGKVTMQFELEVCQLQKPDVVGIRRQRLKGDAWVYKRLVEDILSSCKV

SEQ ID NO: 21279 - protein, 612 aa, Artificial Sequence
  Synthetic polypeptide
PFRPAVFFSSDLPRIKTEIEALKNLRHQHICQLYHVLETANKIFMVLEYCPGGELFDYIISQDRLSEEETRVVFRQIVSAVAYVHSQGYAHRDLKPENLLFDEYHKLKLIDFGLCAKPKGNKDYHLQTCCGSLAYAAPELIQGKSYLGSEADVWSMGILLYVLMCGFLPFDDDNVMALYKKIMRGKYDVPKWLSPSSILLLQQMLQVDPKKRISMKNLLNHPWIMQDYNYPVEWQSKNPFIHLDDDCVTELSVHHRNNRQTMEDLISLWQYDHLTATYLLLLAKKARGKPVRLRLSSFSCGQASATPFTDIKSNNWSLEDVTASDKNYVAGLIDYDWCEDDLSTGAATPRTSQFTKYWTESNGVESKSLTPALCRTPANKLKNKENVYTPKSAVKNEEYFMFPEPKTPVNKNQHKREILTTPNRYTTPSKARNQCLKETPIKIPVNSTGTDKLMTGVISPERRCRSVELDLNQAHMEETPKRKGAKVFGSLERGLDKVITVLTRSKRKGSARDGPRRLKLHYNVTTTRLVNPDQLLNEIMSILPKKHVDFVQKGYTLKCQTQSDFGKVTMQFELEVCQLQKPDVVGIRRQRLKGDAWVYKRLVEDILSSCKV

SEQ ID NO: 21280 - protein, 117 aa, Artificial Sequence
  Synthetic polypeptide
FVYQESSSLASLLASCRWYHGAISRGDAENLLRLCKECSYLVRNSQTSKHDYSLSLRSNQGFMHMKLAKTKEKYVLGQNSPPFDSVPEVIHYYTTRKLPIKGAEHLSLLYPVAVRTL

SEQ ID NO: 21281 - protein, 72 aa, Artificial Sequence
  Synthetic polypeptide
LFPEYARQPSALAFAADLSTKKAPLWLPSLPPADGITEPSAEETPRTCCDSARSVATLSGTARPASMTTPSP

SEQ ID NO: 21282 - protein, 71 aa, Artificial Sequence
  Synthetic polypeptide
RLAHPFPLLLLSMLAPSCFQNTLGSLLPWPSLLICLPRKLLSGFPPCLLQMVSRSHQQRRRREPAATLQGV

SEQ ID NO: 21283 - protein, 37 aa, Artificial Sequence
  Synthetic polypeptide
EPVSTKKRKKNTKINQMVSRSHQQRRRREPAATLQGV

SEQ ID NO: 21284 - protein, 40 aa, Artificial Sequence
  Synthetic polypeptide
PDGITEPSAEETPRTCCDSARSVATLSGTARPASMTTPSP

SEQ ID NO: 21285 - protein, 150 aa, Artificial Sequence
  Synthetic polypeptide
PGVVAHTCNPSTLGGRGGWITCLGVQDQPGQHSESLSLQKKEKKIQKLTRWYHGAISRGDAENLLRLCKECSYLVRNSQTSKHDYSLSLRSNQGFMHMKLAKTKEKYVLGQNSPPFDSVPEVIHYYTTRKLPIKGAEHLSLLYPVAVRTL

SEQ ID NO: 21286 - protein, 135 aa, Artificial Sequence
  Synthetic polypeptide
FHIVQDVPRPIRFIETESRRNFRGRKVSGPSIKVSSYMTPLTNLKAKVLTQTRRAQSAPDCGRASCPRMTTGPPMSTTSLGSGTGSPSQPWQHSLMATRSGSHPPHLRGTGGASFVPLEGALSLSNMGALSSAGS

SEQ ID NO: 21287 - protein, 231 aa, Artificial Sequence
  Synthetic polypeptide
KEFQRQESVRSQHKGIQLYDTPYEPEGQSVDSDSESTVSPRLRESKLPQDDDRPADEYDQPWEWNRVTIPALAAQFNGNEKRQSSPSPSRDRRRQLRAPGGGFKPIKHGSPEFCGILGERVDPAVPLEKQIWYHGAISRGDAENLLRLCKECSYLVRNSQTSKHDYSLSLRSNQGFMHMKLAKTKEKYVLGQNSPPFDSVPEVIHYYTTRKLPIKGAEHLSLLYPVAVRTL

SEQ ID NO: 21288 - protein, 17 aa, Artificial Sequence
  Synthetic polypeptide
RQKVEGISEAGKCPVPA

SEQ ID NO: 21289 - protein, 314 aa, Artificial Sequence
  Synthetic polypeptide
CLPKCGTPSHRCDIRCPENYIVRRFFPSYSLSFQGEKIIHICQRKCLFADCISRWLSNTCKSHLSAEKASPTLSFPAGISTYLAEFQRQESVRSQHKGIQLYDTPYEPEGQSVDSDSESTVSPRLRESKLPQDDDRPADEYDQPWEWNRVTIPALAAQFNGNEKRQSSPSPSRDRRRQLRAPGGGFKPIKHGSPEFCGILGERVDPAVPLEKQIWYHGAISRGDAENLLRLCKECSYLVRNSQTSKHDYSLSLRSNQGFMHMKLAKTKEKYVLGQNSPPFDSVPEVIHYYTTRKLPIKGAEHLSLLYPVAVRTL

SEQ ID NO: 21290 - protein, 177 aa, Artificial Sequence
  Synthetic polypeptide
EGFSLLILSLSRERRLFIFARESVCLLIAFPGGSPTLANLTSQQRKQAPRSASQQASAPTLLNFRGRKVSGPSIKVSSYMTPLTNLKAKVLTQTRRAQSAPDCGRASCPRMTTGPPMSTTSLGSGTGSPSQPWQHSLMATRSGSHPPHLRGTGGASFVPLEGALSLSNMGALSSAGS

SEQ ID NO: 21291 - protein, 138 aa, Artificial Sequence
  Synthetic polypeptide
GERAQTLIREAEVGNSSPAIPAQNFRGRKVSGPSIKVSSYMTPLTNLKAKVLTQTRRAQSAPDCGRASCPRMTTGPPMSTTSLGSGTGSPSQPWQHSLMATRSGSHPPHLRGTGGASFVPLEGALSLSNMGALSSAGS

SEQ ID NO: 21292 - protein, 236 aa, Artificial Sequence
  Synthetic polypeptide
PCHTSSEFQRQESVRSQHKGIQLYDTPYEPEGQSVDSDSESTVSPRLRESKLPQDDDRPADEYDQPWEWNRVTIPALAAQFNGNEKRQSSPSPSRDRRRQLRAPGGGFKPIKHGSPEFCGILGERVDPAVPLEKQIWYHGAISRGDAENLLRLCKECSYLVRNSQTSKHDYSLSLRSNQGFMHMKLAKTKEKYVLGQNSPPFDSVPEVIHYYTTRKLPIKGAEHLSLLYPVAVRTL

SEQ ID NO: 21293 - protein, 27 aa, Artificial Sequence
  Synthetic polypeptide
SEKRRWEILALPYQLRISEAGKCPVPA

SEQ ID NO: 21294 - protein, 225 aa, Artificial Sequence
  Synthetic polypeptide
AGHPGRISAPPLTALLKCAGLNDGQWHSVSFSAKWSHMNVVVDDDTAVQPLVAVLIDSGDTYYFGALYEQSCEAHKHRGNPSGLYYIDADGSGPLGPFLVYCNMTDAAWTVVQHGGPDAVTLRGAPSGHPRSAVSFAYAAGAGQLRSAVNLAERCEQRLALRCGTARRPDSRDGTPLSWWVGRTNETHTSWGGSLPDAQKCTCGLEGNCIDSQYYCNCDAGRNEW

SEQ ID NO: 21295 - protein, 177 aa, Artificial Sequence
  Synthetic polypeptide
AGHPGRISAPPLTALLKCAGLNDGQWHSVSFSAKWSHMNVVVDDDTAVQPLVAVLIDSGDTYYFGALYEQSCEAHKHRGNPSGLYYIDADGSGPLGPFLVYCNMTDAAWTVVQHGGPDAVTLRGAPSGHPRSAVSFAYAAGAGQLRSAVNLAERCEQRLALRCGTARRPDSRGLVTQ

SEQ ID NO: 21296 - protein, 700 aa, Artificial Sequence
  Synthetic polypeptide
AGHPGRISAPPLTALLKCAGLNDGQWHSVSFSAKWSHMNVVVDDDTAVQPLVAVLIDSGDTYYFGGCLDNSSGSGCKSPLGGFQGCLRLITIGDKAVDPILVQQGALGSFRDLQIDSCGITDRCLPSYCEHGGECSQSWDTFSCDCLGTGYTGETCHSSLYEQSCEAHKHRGNPSGLYYIDADGSGPLGPFLVYCNMTADAAWTVVQHGGPDAVTLRGAPSGHPRSAVSFAYAAGAGQLRSAVNLAERCEQRLALRCGTARRPDSRDGTPLSWWVGRTNETHTSWGGSLPDAQKCTCGLEGNCIDSQYYCNCDAGRNEWTSDTIVLSQKEHLPVTQIVMTDAGRPHSEAAYTLGPLLCRGDQSFWNSASFNTETSYLHFPAFHGELTADVCFFFKTTVSSGVFMENLGITDFIRIELRAPTEVTFSFDVGNGPCEVTVQSPTPFNDNQWHHVRAERNVKGASLQVDQLPQKMQPAPADGHVRLQLNSQLFIGGTATRQRGFLGCIRSLQLNGVALDLEERATVTPGVEPGCAGHCSTYGHLCRNGGRCREKRRGVTCDCAFSAYDGPFCSNEISAYFATGSSMTYHFQEHYTLSENSSSLVSSLHRDVTLTREMITLSFRTTRTPSLLLYVSSFYEEYLSVILANNGSLQIRYKLDRHQNPDAFTFDFKNMADGQLHQVKINREEAVVMVEVIPQMQKSN

SEQ ID NO: 21297 - protein, 861 aa, Artificial Sequence
  Synthetic polypeptide
AGHPGRISAPPLTALLKCAGLNDGQWHSVSFSAKWSHMNVVVDDDTAVQPLVAVLIDSGDTYYFGGCLDNSSGSGCKSPLGGFQGCLRLITIGDKAVDPILVQQGALGSFRDLQIDSCGITDRCLPSYCEHGGECSQSWDTFSCDCLGTGYTGETCHSSLYEQSCEAHKHRGNPSGLYYIDADGSGPLGPFLVYCNMTADAAWTVVQHGGPDAVTLRGAPSGHPRSAVSFAYAAGAGQLRSAVNLAERCEQRLALRCGTARRPDSRDGTPLSWWVGRTNETHTSWGGSLPDAQKCTCGLEGNCIDSQYYCNCDAGRNEWTSDTIVLSQKEHLPVTQIVMTDAGRPHSEAAYTLGPLLCRGDQSFWNSASFNTETSYLHFPAFHGELTADVCFFFKTTVSSGVFMENLGITDFIRIELRAPTEVTFSFDVGNGPCEVTVQSPTPFNDNQWHHVRAERNVKGASLQVDQLPQKMQPAPADGHVRLQLNSQLFIGGTATRQRGFLGCIRSLQLNGVALDLEERATVTPGVEPGCAGHCSTYGHLCRNGGRCREKRRGVTCDCAFSAYDGPFCSNEISAYFATGSSMTYHFQEHYTLSENSSSLVSSLHRDVTLTREMITLSFRTTRTPSLLLYVSSFYEEYLSVILANNGSLQIRYKLDRHQNPDAFTFDFKNMADGQLHQVKINREEAVVMVEVNQSTKKQVILSSGTEFNAVKSLILGKVLEAAGADPDTRRAATSGFTGCLSAVRFGRAAPLKAALRPSGPSRVTVRGHVAPMARCAAGAASGSPARELAPRLAGGAGRSGPADEGEPLVNADRRDSAVIGGVIAVVIFILLCITAIAIRIYQQRKLRKENESKVSKKEEC

SEQ ID NO: 21298 - protein, 318 aa, Artificial Sequence
  Synthetic polypeptide
AGHPGRISAPPLTALLKCAGLNDGQWHSVSFSAKWSHMNVVVDDDTAVQPLVAVLIDSGDTYYFGGCLDNSSGSGCKSPLGGFQGCLRLITIGDKAVDPILVQQGALGSFRDLQIDSCGITDRCLPSYCEHGGECSQSWDTFSCDCLGTGYTGETCHSSLYEQSCEAHKHRGNPSGLYYIDADGSGPLGPFLVYCNMTDAAWTVVQHGGPDAVTLRGAPSGHPRSAVSFAYAAGAGQLRSAVNLAERCEQRLALRCGTARRPDSRDGTPLSWWVGRTNETHTSWGGSLPDAQKCTCGLEGNCIDSQYYCNCDAGRNEW

SEQ ID NO: 21299 - protein, 780 aa, Artificial Sequence
  Synthetic polypeptide
AGHPGRISAPPLTALLKCAGLNDGQWHSVSFSAKWSHMNVVVDDDTAVQPLVAVLIDSGDTYYFGGCLDNSSGSGCKSPLGGFQGCLRLITIGDKAVDPILVQQGALGSFRDLQIDSCGITDRCLPSYCEHGGECSQSWDTFSCDCLGTGYTGETCHSSLYEQSCEAHKHRGNPSGLYYIDADGSGPLGPFLVYCNMTDAAWTVVQHGGPDAVTLRGAPSGHPRSAVSFAYAAGAGQLRSAVNLAERCEQRLALRCGTARRPDSRDGTPLSWWVGRTNETHTSWGGSLPDAQKCTCGLEGNCIDSQYYCNCDAGRNEWTSDTIVLSQKEHLPVTQIVMTDAGRPHSEAAYTLGPLLCRGDQSFWNSASFNTETSYLHFPAFHGELTADVCFFFKTTVSSGVFMENLGITDFIRIELRAPTEVTFSFDVGNGPCEVTVQSPTPFNDNQWHHVRAERNVKGASLQVDQLPQKMQPAPADGHVRLQLNSQLFIEISAYFATGSSMTYHFQEHYTLSENSSSLVSSLHRDVTLTREMITLSFRTTRTPSLLLYVSSFYEEYLSVILANNGSLQIRYKLDRHQNPDAFTFDFKNMADGQLHQVKINREEAVVMVEVNQSTKKQVILSSGTEFNAVKSLILGKVLEAAGADPDTRRAATSGFTGCLSAVRFGRAAPLKAALRPSGPSRVTVRGHVAPMARCAAGAASGSPARELAPRLAGGAGRSGPADEGEPLVNADRRDSAVIGGVIAVVIFILLCITAIAIRIYQQRKLRKENESKVSKKEEC

SEQ ID NO: 21300 - protein, 4 aa, Artificial Sequence
  Synthetic polypeptide
NVLD

SEQ ID NO: 21301 - protein, 44 aa, Artificial Sequence
  Synthetic polypeptide
SWAPWKNLSSSTYCPSEMCWIKRWAVALCVLLCQVEPYECGGGR

SEQ ID NO: 21302 - protein, 24 aa, Artificial Sequence
  Synthetic polypeptide
DIGLGAAGFWVYIQLCCPTDVVKL

SEQ ID NO: 21303 - protein, 102 aa, Artificial Sequence
  Synthetic polypeptide
DTVMLMRHWPGSSRILGLYPAVLSHRCGEAVEKNKRLITADQREYQQELKKNYNKLKENLRPMIERKIPELYKPIFRVESQKRDSFHRSSFRKCETQLSQGS

SEQ ID NO: 21304 - protein, 28 aa, Artificial Sequence
  Synthetic polypeptide
RHSDADETLAWEQQDSGFISSCAVPQMW

SEQ ID NO: 21305 - protein, 156 aa, Artificial Sequence; identical to SEQ ID NO: 3078
  Synthetic polypeptide

SEQ ID NO: 21306 - protein, 62 aa, Artificial Sequence; identical to SEQ ID NO: 4603
  Synthetic polypeptide

SEQ ID NO: 21307 - protein, 35 aa, Artificial Sequence; identical to SEQ ID NO: 6145
  Synthetic polypeptide

SEQ ID NO: 21308 - protein, 54 aa, Artificial Sequence
  Synthetic polypeptide
NTDSWAPPPGFLLQAVWGPRHGRADMGTVHCDPTKGFQKRIWNCSVRRQRQPPL

SEQ ID NO: 21309 - protein, 38 aa, Artificial Sequence
  Synthetic polypeptide
PRAVAHRYRLEGVLKHGFLGPTPRVSASGSLGPQAWKS

SEQ ID NO: 21310 - protein, 1164 aa, Artificial Sequence
  Synthetic polypeptide
QSSGTSVSPGGRVKTRIPGPHPQGFCFRQSGAPGMEELIWEQYTVTLQKDSKRGFGIAVSGGRDNPHFENGETSIVISDVLPGGPADGLLQENDRVVMVNGTPMEDVLHSFAVQQLRKSGKVAAIVVKRPRKVQVAALQASPPLDQDDRAFEVMDEFDGRSFRSGYSERSRLNSHGGRSRSWEDSPERGRPHERARSRERDLSRDRSRGRSLERGLDQDHARTRDRSRGRSLERGLDHDFGPSRDRDRDRSRGRSIDQDYERAYHRAYDPDYERAYSPEYRRGARHDARSRGPRSRSREHPHSRSPSPEPRGRPGPIGVLLMKSRANEEYGLRLGSQIFVKEMTRTGLATKDGNLHEGDIILKINGTVTENMSLTDARKLIEKSRGKLQLVVLRDSQQTLINIPSLNDSDSEIEDISEIESNRSFSPEERRHQYSDYDYHSSSEKLKERPSSREDTPSRLSRMGATPTPFKSTGDIAGTVVPETNKEPRYQEDPPAPQPKAAPRTFLRPSPEDEAIYGPNTKMVRFKKGDSVGLRLAGGNDVGIFVAGIQEGTSAEQEGLQEGDQILKVNTQDFRGLVREDAVLYLLEIPKGEMVTILAQSRADVYRDILACGRGDSFFIRSHFECEKETPQSLAFTRGEVFRVVDTLYDGKLGNWLAVRIGNELEKGLIPNKSRAEQMASVQNAQRDNAGDRADFWRMRGQRSGVKKNLRKSREDLTAVVSVSTKFPAYERVLLREAGFKRPVVLFGPIADIAMEKLANELPDWFQTAKTEPKDAGSEKSTGVVRLNTVRQIIEQDKHALLDVTPKAVDLLNYTQWFPIVIFFNPDSRQGVKTMRQRLNPTSNKSSRKLFDQANKLKKTCAHLFTATINLNSANDSWFGSLKDTIQHQQGEAVWVSEGKMEGMDDDPEDRMSYLTAMGADYLSCDSRLISDFEDTDGEGGAYTDNELDEPAEEPLVSSITRSSEPVQHEEAKTQNKEESYDFSKSYEYKSNPSAVAGNETPGASTKGYPPPVAAKPTFGRSILKPSTPIPPQEGEEVGESSEEQDNAPKSVLGKVKIFEKMDHKARLQRMQELQEAQNARIEIAQKHPDIYAVPIKTHKPDPGTPQHTSSRPPEPQKAPSRPYQDTRGSYGSDAEEEEYRQQLSEHSKRGYYGQSARYRDTEL

SEQ ID NO: 21311 - protein, 1054 aa, Artificial Sequence
  Synthetic polypeptide
QSSGTSVSPGGRVKTRIPGPHPQGFCFRQSGAPGMEELIWEQYTVTLQKDSKRGFGIAVSGGRDNPHFENGETSIVISDVLPGGPADGLLQENDRVVMVNGTPMEDVLHSFAVQQLRKSGKVAAIVVKRPRKVQVAALQASPPLDQDDRAFEVMDEFDGRSFRSGYSERSRLNSHGGRSRSWEDSPERGRPHERARSRERDLSRDRSRGRSLERGLDQDHARTRDRSRGRSLERGLDHDFGPSRDRDRDRSRGRSIDQDYERAYHRAYDPDYERAYSPEYRRGARHDARSRGPRSRSREHPHSRSPSPEPRGRPGPIGVLLMKSRANEEYGLRLGSQIFVKEMTRTGLATKDGNLHEGDIILKINGTVTENMSLTDARKLIEKSRGKLQLVVLRDSQQTLINIPSLNDSDSEIEDISEIESNRSFSPEERRHQYSDYDYHSSSEKLKERPSSREDTPSRLSRMGATPTPFKSTGDIAGTVVPETNKEPRYQEDPPAPQPKAAPRTFLRPSPEDEAIYGPNTKMVRFKKGDSVGLRLAGGNDVGIFVAGIQEGTSAEQEGLQEGDQILKVNTQDFRGLVREDAVLYLLEIPKGEMVTILAQSRADVYRDILACGRGDSFFIRSHFECEKETPQSLAFTRGEVFRVVDTLYDGKLGNWLAVRIGNELEKGLIPNKSRAEQMASVQNAQRDNAGDRADFWRMRGQRSGVKKNLRKSREDLTAVVSVSTKFPAYERVLLREAGFKRPVVLFGPIADIAMEKLANELPDWFQTAKTEPKDAGSEKSTGVVRLNTVRQIIEQDKHALLDVTPKAVDLLNYTQWFPIVIFFNPDSRQGVKTMRQRLNPTSNKSSRKLFDQANKLKKTCAHLFTATINLNSANDSWFGSLKDTIQHQQGEAVWVSEGKMEGMDDDPEDRMSYLTAMGADYLSCDSRLISDFEDTDGEGGAYTDNELDEPAEEPLVSSITRSSEPVQHEEIEIAQKHPDIYAVPIKTHKPDPGTPQHTSSRPPEPQKAPSRPYQDTRGSYGSDAEEEEYRQQLSEHSKRGYYGQSARYRDTEL

SEQ ID NO: 21312 - protein, 1201 aa, Artificial Sequence
  Synthetic polypeptide
QSSGTSVSPGGRVKTRIPGPHPQGFCFRQSGAPGMEELIWEQYTVTLQKDSKRGFGIAVSGGRDNPHFENGETSIVISDVLPGGPADGLLQENDRVVMVNGTPMEDVLHSFAVQQLRKSGKVAAIVVKRPRKVQVAALQASPPLDQDDRAFEVMDEFDGRSFRSGYSERSRLNSHGGRSRSWEDSPERGRPHERARSRERDLSRDRSRGRSLERGLDQDHARTRDRSRGRSLERGLDHDFGPSRDRDRDRSRGRSIDQDYERAYHRAYDPDYERAYSPEYRRGARHDARSRGPRSRSREHPHSRSPSPEPRGRPGPIGVLLMKSRANEEYGLRLGSQIFVKEMTRTGLATKDGNLHEGDIILKINGTVTENMSLTDARKLIEKSRGKLQLVVLRDSQQTLINIPSLNDSDSEIEDISEIESNRSFSPEERRHQYSDYDYHSSSEKLKERPSSREDTPSRLSRMGATPTPFKSTGDIAGTVVPETNKEPRYQEDPPAPQPKAAPRTFLRPSPEDEAIYGPNTKMVRFKKGDSVGLRLAGGNDVGIFVAGIQEGTSAEQEGLQEGDQILKVNTQDFRGLVREDAVLYLLEIPKGEMVTILAQSRADVYRDILACGRGDSFFIRSHFECEKETPQSLAFTRGEVFRVVDTLYDGKLGNWLAVRIGNELEKGLIPNKSRAEQMASVQNAQRDNAGDRADFWRMRGQRSGVKKNLRKSREDLTAVVSVSTKFPAYERVLLREAGFKRPVVLFGPIADIAMEKLANELPDWFQTAKTEPKDAGSEKSTGVVRLNTVRQIIEQDKHALLDVTPKAVDLLNYTQWFPIVIFFNPDSRQGVKTMRQRLNPTSNKSSRKLFDQANKLKKTCAHLFTATINLNSANDSWFGSLKDTIQHQQGEAVWVSEGKMEGMDDDPEDRMSYLTAMGADYLSCDSRLISDFEDTDGEGGAYTDNELDEPAEEPLVSSITRSSEPVQHEESIRKPSPEPRAQMRRAASSDQLRDNSPPPAFKPEPPKAKTQNKEESYDFSKSYEYKSNPSAVAGNETPGASTKGYPPPVAAKPTFGRSILKPSTPIPPQEGEEVGESSEEQDNAPKSVLGKVKIFEKMDHKARLQRMQELQEAQNARIEIAQKHPDIYAVPIKTHKPDPGTPQHTSSRPPEPQKAPSRPYQDTRGSYGSDAEEEEYRQQLSEHSKRGYYGQSARYRDTEL

SEQ ID NO: 21313 - protein, 1004 aa, Artificial Sequence
  Synthetic polypeptide
QSSGTSVSPGGRVKTRIPGPHPQGFCFRQSGAPGMEELIWEQYTVTLQKDSKRGFGIAVSGGRDNPHFENGETSIVISDVLPGGPADGLLQENDRVVMVNGTPMEDVLHSFAVQQLRKSGKVAAIVVKRPRKVQVAALQASPPLDQDDRAFEVMDEFDGRSFRSGYSERSRLNSHGGRSRSWEDSPERGRPHERARSRERDLSRDRSRGRSLERGLDQDHARTRDRSRGRSLERGLDHDFGPSRDRDRDRSRGRSIDQDYERAYHRAYDPDYERAYSPEYRRGARHDARSRGPRSRSREHPHSRSPSPEPRGRPGPIGVLLMKSRANEEYGLRLGSQIFVKEMTRTGLATKDGNLHEGDIILKINGTVTENMSLTDARKLIEKSRGKLQLVVLRDSQQTLINIPSLNDSDSEIEDISEIESNRSFSPEERRHQYSDYDYHSSSEKLKERPSSREDTPSRLSRMGATPTPFKSTGDIAGTVVPETNKEPRYQEDPPAPQPKAAPRTFLRPSPEDEAIYGPNTKMVRFKKGDSVGLRLAGGNDVGIFVAGIQEGTSAEQEGLQEGDQILKVNTQDFRGLVREDAVLYLLEIPKGEMVTILAQSRADVYRDILACGRGDSFFIRSHFECEKETPQSLAFTRGEVFRVVDTLYDGKLGNWLAVRIGNELEKGLIPNKSRAEQMASVQNAQRDNAGDRADFWRMRGQRSGVKKNLRKSREDLTAVVSVSTKFPAYERVLLREAGFKRPVVLFGPIADIAMEKLANELPDWFQTAKTEPKDAGSEKSTGVVRLNTVRQIIEQDKHALLDVTPKAVDLLNYTQWFPIVIFFNPDSRQGVKTMRQRLNPTSNKSSRKLFDQANKLKKTCAHLFTATINLNSANDSWFGSLKDTIQHQQGEAVWVSEGKMEGMDDDPEDRMSYLTAMGADYLSCDSRLISDFEDTDGEGGAYTDNELDEPAEEPLVSSITRSSEPVQHEEVRRGRPRAGTGEPGVFLALSWTAVCSGCCGRHS

SEQ ID NO: 21314 - protein, 38 aa, Artificial Sequence
  Synthetic polypeptide
LCPRHGRADMGTVHCDPTKGFQKRIWNCSVRRQRQPPL

SEQ ID NO: 21315 - protein, 8 aa, Artificial Sequence
  Synthetic polypeptide
VMPQAWKS

SEQ ID NO: 21316 - protein, 1134 aa, Artificial Sequence
  Synthetic polypeptide
YAPGMEELIWEQYTVTLQKDSKRGFGIAVSGGRDNPHFENGETSIVISDVLPGGPADGLLQENDRVVMVNGTPMEDVLHSFAVQQLRKSGKVAAIVVKRPRKVQVAALQASPPLDQDDRAFEVMDEFDGRSFRSGYSERSRLNSHGGRSRSWEDSPERGRPHERARSRERDLSRDRSRGRSLERGLDQDHARTRDRSRGRSLERGLDHDFGPSRDRDRDRSRGRSIDQDYERAYHRAYDPDYERAYSPEYRRGARHDARSRGPRSRSREHPHSRSPSPEPRGRPGPIGVLLMKSRANEEYGLRLGSQIFVKEMTRTGLATKDGNLHEGDIILKINGTVTENMSLTDARKLIEKSRGKLQLVVLRDSQQTLINIPSLNDSDSEIEDISEIESNRSFSPEERRHQYSDYDYHSSSEKLKERPSSREDTPSRLSRMGATPTPFKSTGDIAGTVVPETNKEPRYQEDPPAPQPKAAPRTFLRPSPEDEAIYGPNTKMVRFKKGDSVGLRLAGGNDVGIFVAGIQEGTSAEQEGLQEGDQILKVNTQDFRGLVREDAVLYLLEIPKGEMVTILAQSRADVYRDILACGRGDSFFIRSHFECEKETPQSLAFTRGEVFRVVDTLYDGKLGNWLAVRIGNELEKGLIPNKSRAEQMASVQNAQRDNAGDRADFWRMRGQRSGVKKNLRKSREDLTAVVSVSTKFPAYERVLLREAGFKRPVVLFGPIADIAMEKLANELPDWFQTAKTEPKDAGSEKSTGVVRLNTVRQIIEQDKHALLDVTPKAVDLLNYTQWFPIVIFFNPDSRQGVKTMRQRLNPTSNKSSRKLFDQANKLKKTCAHLFTATINLNSANDSWFGSLKDTIQHQQGEAVWVSEGKMEGMDDDPEDRMSYLTAMGADYLSCDSRLISDFEDTDGEGGAYTDNELDEPAEEPLVSSITRSSEPVQHEEAKTQNKEESYDFSKSYEYKSNPSAVAGNETPGASTKGYPPPVAAKPTFGRSILKPSTPIPPQEGEEVGESSEEQDNAPKSVLGKVKIFEKMDHKARLQRMQELQEAQNARIEIAQKHPDIYAVPIKTHKPDPGTPQHTSSRPPEPQKAPSRPYQDTRGSYGSDAEEEEYRQQLSEHSKRGYYGQSARYRDTEL

SEQ ID NO: 21317 - protein, 1024 aa, Artificial Sequence
  Synthetic polypeptide
YAPGMEELIWEQYTVTLQKDSKRGFGIAVSGGRDNPHFENGETSIVISDVLPGGPADGLLQENDRVVMVNGTPMEDVLHSFAVQQLRKSGKVAAIVVKRPRKVQVAALQASPPLDQDDRAFEVMDEFDGRSFRSGYSERSRLNSHGGRSRSWEDSPERGRPHERARSRERDLSRDRSRGRSLERGLDQDHARTRDRSRGRSLERGLDHDFGPSRDRDRDRSRGRSIDQDYERAYHRAYDPDYERAYSPEYRRGARHDARSRGPRSRSREHPHSRSPSPEPRGRPGPIGVLLMKSRANEEYGLRLGSQIFVKEMTRTGLATKDGNLHEGDIILKINGTVTENMSLTDARKLIEKSRGKLQLVVLRDSQQTLINIPSLNDSDSEIEDISEIESNRSFSPEERRHQYSDYDYHSSSEKLKERPSSREDTPSRLSRMGATPTPFKSTGDIAGTVVPETNKEPRYQEDPPAPQPKAAPRTFLRPSPEDEAIYGPNTKMVRFKKGDSVGLRLAGGNDVGIFVAGIQEGTSAEQEGLQEGDQILKVNTQDFRGLVREDAVLYLLEIPKGEMVTILAQSRADVYRDILACGRGDSFFIRSHFECEKETPQSLAFTRGEVFRVVDTLYDGKLGNWLAVRIGNELEKGLIPNKSRAEQMASVQNAQRDNAGDRADFWRMRGQRSGVKKNLRKSREDLTAVVSVSTKFPAYERVLLREAGFKRPVVLFGPIADIAMEKLANELPDWFQTAKTEPKDAGSEKSTGVVRLNTVRQIIEQDKHALLDVTPKAVDLLNYTQWFPIVIFFNPDSRQGVKTMRQRLNPTSNKSSRKLFDQANKLKKTCAHLFTATINLNSANDSWFGSLKDTIQHQQGEAVWVSEGKMEGMDDDPEDRMSYLTAMGADYLSCDSRLISDFEDTDGEGGAYTDNELDEPAEEPLVSSITRSSEPVQHEEIEIAQKHPDIYAVPIKTHKPDPGTPQHTSSRPPEPQKAPSRPYQDTRGSYGSDAEEEEYRQQLSEHSKRGYYGQSARYRDTEL

SEQ ID NO: 21318 - protein, 1171 aa, Artificial Sequence
  Synthetic polypeptide
YAPGMEELIWEQYTVTLQKDSKRGFGIAVSGGRDNPHFENGETSIVISDVLPGGPADGLLQENDRVVMVNGTPMEDVLHSFAVQQLRKSGKVAAIVVKRPRKVQVAALQASPPLDQDDRAFEVMDEFDGRSFRSGYSERSRLNSHGGRSRSWEDSPERGRPHERARSRERDLSRDRSRGRSLERGLDQDHARTRDRSRGRSLERGLDHDFGPSRDRDRDRSRGRSIDQDYERAYHRAYDPDYERAYSPEYRRGARHDARSRGPRSRSREHPHSRSPSPEPRGRPGPIGVLLMKSRANEEYGLRLGSQIFVKEMTRTGLATKDGNLHEGDIILKINGTVTENMSLTDARKLIEKSRGKLQLVVLRDSQQTLINIPSLNDSDSEIEDISEIESNRSFSPEERRHQYSDYDYHSSSEKLKERPSSREDTPSRLSRMGATPTPFKSTGDIAGTVVPETNKEPRYQEDPPAPQPKAAPRTFLRPSPEDEAIYGPNTKMVRFKKGDSVGLRLAGGNDVGIFVAGIQEGTSAEQEGLQEGDQILKVNTQDFRGLVREDAVLYLLEIPKGEMVTILAQSRADVYRDILACGRGDSFFIRSHFECEKETPQSLAFTRGEVFRVVDTLYDGKLGNWLAVRIGNELEKGLIPNKSRAEQMASVQNAQRDNAGDRADFWRMRGQRSGVKKNLRKSREDLTAVVSVSTKFPAYERVLLREAGFKRPVVLFGPIADIAMEKLANELPDWFQTAKTEPKDAGSEKSTGVVRLNTVRQIIEQDKHALLDVTPKAVDLLNYTQWFPIVIFFNPDSRQGVKTMRQRLNPTSNKSSRKLFDQANKLKKTCAHLFTATINLNSANDSWFGSLKDTIQHQQGEAVWVSEGKMEGMDDDPEDRMSYLTAMGADYLSCDSRLISDFEDTDGEGGAYTDNELDEPAEEPLVSSITRSSEPVQHEESIRKPSPEPRAQMRRAASSDQLRDNSPPPAFKPEPPKAKTQNKEESYDFSKSYEYKSNPSAVAGNETPGASTKGYPPPVAAKPTFGRSILKPSTPIPPQEGEEVGESSEEQDNAPKSVLGKVKIFEKMDHKARLQRMQELQEAQNARIEIAQKHPDIYAVPIKTHKPDPGTPQHTSSRPPEPQKAPSRPYQDTRGSYGSDAEEEEYRQQLSEHSKRGYYGQSARYRDTEL

SEQ ID NO: 21319 - protein, 974 aa, Artificial Sequence
  Synthetic polypeptide
YAPGMEELIWEQYTVTLQKDSKRGFGIAVSGGRDNPHFENGETSIVISDVLPGGPADGLLQENDRVVMVNGTPMEDVLHSFAVQQLRKSGKVAAIVVKRPRKVQVAALQASPPLDQDDRAFEVMDEFDGRSFRSGYSERSRLNSHGGRSRSWEDSPERGRPHERARSRERDLSRDRSRGRSLERGLDQDHARTRDRSRGRSLERGLDHDFGPSRDRDRDRSRGRSIDQDYERAYHRAYDPDYERAYSPEYRRGARHDARSRGPRSRSREHPHSRSPSPEPRGRPGPIGVLLMKSRANEEYGLRLGSQIFVKEMTRTGLATKDGNLHEGDIILKINGTVTENMSLTDARKLIEKSRGKLQLVVLRDSQQTLINIPSLNDSDSEIEDISEIESNRSFSPEERRHQYSDYDYHSSSEKLKERPSSREDTPSRLSRMGATPTPFKSTGDIAGTVVPETNKEPRYQEDPPAPQPKAAPRTFLRPSPEDEAIYGPNTKMVRFKKGDSVGLRLAGGNDVGIFVAGIQEGTSAEQEGLQEGDQILKVNTQDFRGLVREDAVLYLLEIPKGEMVTILAQSRADVYRDILACGRGDSFFIRSHFECEKETPQSLAFTRGEVFRVVDTLYDGKLGNWLAVRIGNELEKGLIPNKSRAEQMASVQNAQRDNAGDRADFWRMRGQRSGVKKNLRKSREDLTAVVSVSTKFPAYERVLLREAGFKRPVVLFGPIADIAMEKLANELPDWFQTAKTEPKDAGSEKSTGVVRLNTVRQIIEQDKHALLDVTPKAVDLLNYTQWFPIVIFFNPDSRQGVKTMRQRLNPTSNKSSRKLFDQANKLKKTCAHLFTATINLNSANDSWFGSLKDTIQHQQGEAVWVSEGKMEGMDDDPEDRMSYLTAMGADYLSCDSRLISDFEDTDGEGGAYTDNELDEPAEEPLVSSITRSSEPVQHEEVRRGRPRAGTGEPGVFLALSWTAVCSGCCGRHS

SEQ ID NO: 21320 - protein, 607 aa, Artificial Sequence
  Synthetic polypeptide
GQEFETSLANMVNTQDFRGLVREDAVLYLLEIPKGEMVTILAQSRADVYRDILACGRGDSFFIRSHFECEKETPQSLAFTRGEVFRVVDTLYDGKLGNWLAVRIGNELEKGLIPNKSRAEQMASVQNAQRDNAGDRADFWRMRGQRSGVKKNLRKSREDLTAVVSVSTKFPAYERVLLREAGFKRPVVLFGPIADIAMEKLANELPDWFQTAKTEPKDAGSEKSTGVVRLNTVRQIIEQDKHALLDVTPKAVDLLNYTQWFPIVIFFNPDSRQGVKTMRQRLNPTSNKSSRKLFDQANKLKKTCAHLFTATINLNSANDSWFGSLKDTIQHQQGEAVWVSEGKMEGMDDDPEDRMSYLTAMGADYLSCDSRLISDFEDTDGEGGAYTDNELDEPAEEPLVSSITRSSEPVQHEEAKTQNKEESYDFSKSYEYKSNPSAVAGNETPGASTKGYPPPVAAKPTFGRSILKPSTPIPPQEGEEVGESSEEQDNAPKSVLGKVKIFEKMDHKARLQRMQELQEAQNARIEIAQKHPDIYAVPIKTHKPDPGTPQHTSSRPPEPQKAPSRPYQDTRGSYGSDAEEEEYRQQLSEHSKRGYYGQSARYRDTEL

SEQ ID NO: 21321 - protein, 497 aa, Artificial Sequence
  Synthetic polypeptide
GQEFETSLANMVNTQDFRGLVREDAVLYLLEIPKGEMVTILAQSRADVYRDILACGRGDSFFIRSHFECEKETPQSLAFTRGEVFRVVDTLYDGKLGNWLAVRIGNELEKGLIPNKSRAEQMASVQNAQRDNAGDRADFWRMRGQRSGVKKNLRKSREDLTAVVSVSTKFPAYERVLLREAGFKRPVVLFGPIADIAMEKLANELPDWFQTAKTEPKDAGSEKSTGVVRLNTVRQIIEQDKHALLDVTPKAVDLLNYTQWFPIVIFFNPDSRQGVKTMRQRLNPTSNKSSRKLFDQANKLKKTCAHLFTATINLNSANDSWFGSLKDTIQHQQGEAVWVSEGKMEGMDDDPEDRMSYLTAMGADYLSCDSRLISDFEDTDGEGGAYTDNELDEPAEEPLVSSITRSSEPVQHEEIEIAQKHPDIYAVPIKTHKPDPGTPQHTSSRPPEPQKAPSRPYQDTRGSYGSDAEEEEYRQQLSEHSKRGYYGQSARYRDTEL

SEQ ID NO: 21322 - protein, 644 aa, Artificial Sequence
  Synthetic polypeptide
GQEFETSLANMVNTQDFRGLVREDAVLYLLEIPKGEMVTILAQSRADVYRDILACGRGDSFFIRSHFECEKETPQSLAFTRGEVFRVVDTLYDGKLGNWLAVRIGNELEKGLIPNKSRAEQMASVQNAQRDNAGDRADFWRMRGQRSGVKKNLRKSREDLTAVVSVSTKFPAYERVLLREAGFKRPVVLFGPIADIAMEKLANELPDWFQTAKTEPKDAGSEKSTGVVRLNTVRQIIEQDKHALLDVTPKAVDLLNYTQWFPIVIFFNPDSRQGVKTMRQRLNPTSNKSSRKLFDQANKLKKTCAHLFTATINLNSANDSWFGSLKDTIQHQQGEAVWVSEGKMEGMDDDPEDRMSYLTAMGADYLSCDSRLISDFEDTDGEGGAYTDNELDEPAEEPLVSSITRSSEPVQHEESIRKPSPEPRAQMRRAASSDQLRDNSPPPAFKPEPPKAKTQNKEESYDFSKSYEYKSNPSAVAGNETPGASTKGYPPPVAAKPTFGRSILKPSTPIPPQEGEEVGESSEEQDNAPKSVLGKVKIFEKMDHKARLQRMQELQEAQNARIEIAQKHPDIYAVPIKTHKPDPGTPQHTSSRPPEPQKAPSRPYQDTRGSYGSDAEEEEYRQQLSEHSKRGYYGQSARYRDTEL

SEQ ID NO: 21323 - protein, 447 aa, Artificial Sequence
  Synthetic polypeptide
GQEFETSLANMVNTQDFRGLVREDAVLYLLEIPKGEMVTILAQSRADVYRDILACGRGDSFFIRSHFECEKETPQSLAFTRGEVFRVVDTLYDGKLGNWLAVRIGNELEKGLIPNKSRAEQMASVQNAQRDNAGDRADFWRMRGQRSGVKKNLRKSREDLTAVVSVSTKFPAYERVLLREAGFKRPVVLFGPIADIAMEKLANELPDWFQTAKTEPKDAGSEKSTGVVRLNTVRQIIEQDKHALLDVTPKAVDLLNYTQWFPIVIFFNPDSRQGVKTMRQRLNPTSNKSSRKLFDQANKLKKTCAHLFTATINLNSANDSWFGSLKDTIQHQQGEAVWVSEGKMEGMDDDPEDRMSYLTAMGADYLSCDSRLISDFEDTDGEGGAYTDNELDEPAEEPLVSSITRSSEPVQHEEVRRGRPRAGTGEPGVFLALSWTAVCSGCCGRHS

SEQ ID NO: 21324 - protein, 46 aa, Artificial Sequence
  Synthetic polypeptide
SQHFGRPRWADHLRSRVRDQPGQHGEHTGFQRISAGGCRSLPVRNP

SEQ ID NO: 21325 - protein, 17 aa, Artificial Sequence
  Synthetic polypeptide
VGGSPEVKSSRPAWPTW

SEQ ID NO: 21326 - protein, 415 aa, Artificial Sequence
  Synthetic polypeptide
APQAPRVLRQILMSEPGKLLQKVKVWLQEYWNVTDLIAILLFSVGMILRLQDQPFRSDGRVIYCVNIIYWYIRLLDIFGVNKYLGPYVMMIGKMMIDMMYFVIIMLVVLMSFGVARQAILFPNEEPSWKLAKNIFYMPYWMIYGEVFADQIDPPCGQNETREDGKIIQLPPCKTGAWIVPAIMACYLLVANILLVNLLIAVFNNTFFEVKSISNQVWKFQRYQLIMTFHERPVLPPPLIIFSHMTMIFQHLCCRWRKHESDPDERDYGLKLFITDDELKKVHDFEEQCIEEYFREKDDRFNSSNDERIRVTSERVENMSMRLEEVNEREHSMKASLQTVDIRLAQLEDLIGRMATALERLTGLERAESNKIRSRTSSDCTDAAYIVRQSSFNSQEGNTFKLQESIDPAEHPLYSV

SEQ ID NO: 21327 - protein, 797 aa, Artificial Sequence
  Synthetic polypeptide
APQAPRVLRQILMSEPGKLLQKVKVWLQEYWNVTDLIAILLFSVGMILRLQDQPFRSDGRVIYCVNIIYWYIRLLDIFGVNKYLGPYVMMIGKMMIDMMYFVIIMLVVLMSFGVARQAILFPNEEPSWKLAKNIFYMPYWMIYGEVFADQIDPPCGQNETREDGKIIQLPPCKTGAWIVPAIMACYLLVANILLVNLLIAVFNNTFFEVKSISNQVWKFQRYQLIMTFHERPVLPPPLIIFSHMTMIFQHLCCRWRKHESDPDERDYGLKLFITDDELKKVHDFEEQCIEEYFREKDDRFNSSNDERIRVTSERVENMSMRLEEVNEREHSMKASLQTVDIRLAQLEDLIGRMATALERLTGLERAESNKIRSRTSSDCTDAAYIVRQSSFNSQEGNTFKLQESIDPAGEETMSPTSPTLMPRMRSHSFYSVNMKDKGGIEKLESIFKERSLSLHRATSSHSVAKEPKAPAAPANTLAIVPDSRRPSSCIDIYVSAMDELHCDIDPLDNSVNILGLGEPSFSTPVPSTAPSSSAYATLAPTDRPPSRSIDFEDITSMDTRSFSSDYTHLPECQNPWDSEPPMYHTIERSKSSRYLATTPFLLEEAPIVKSHSFMFSPSRSYYANFGVPVKTAEYTSITDCIDTRCVNAPQAIADRAAFPGGLGDKVEDLTCCHPEREAELSHPSSDSEENEAKGRRATIAISSQEGDNSERTLSNNITVPKIERANSYSAEEPSAPYAHTRKSFSISDKLDRQRNTASLRNPFQRSKSSKPEGRGDSLSMRRLSRTSAFQSFESKHN

SEQ ID NO: 21328 - protein, 809 aa, Artificial Sequence
  Synthetic polypeptide
APQAPRVLRQILMSEPGKLLQKVKVWLQEYWNVTDLIAILLFSVGMILRLQDQPFRSDGRVIYCVNIIYWYIRLLDIFGVNKYLGPYVMMIGKMMIDMMYFVIIMLVVLMSFGVARQAILFPNEEPSWKLAKNIFYMPYWMIYGEVFADQIDRKQVYDSHTPKSAPCGQNETREDGKIIQLPPCKTGAWIVPAIMACYLLVANILLVNLLIAVFNNTFFEVKSISNQVWKFQRYQLIMTFHERPVLPPPLIIFSHMTMIFQHLCCRWRKHESDPDERDYGLKLFITDDELKKVHDFEEQCIEEYFREKDDRFNSSNDERIRVTSERVENMSMRLEEVNEREHSMKASLQTVDIRLAQLEDLIGRMATALERLTGLERAESNKIRSRTSSDCTDAAYIVRQSSFNSQEGNTFKLQESIDPAGEETMSPTSPTLMPRMRSHSFYSVNMKDKGGIEKLESIFKERSLSLHRATSSHSVAKEPKAPAAPANTLAIVPDSRRPSSCIDIYVSAMDELHCDIDPLDNSVNILGLGEPSFSTPVPSTAPSSSAYATLAPTDRPPSRSIDFEDITSMDTRSFSSDYTHLPECQNPWDSEPPMYHTIERSKSSRYLATTPFLLEEAPIVKSHSFMFSPSRSYYANFGVPVKTAEYTSITDCIDTRCVNAPQAIADRAAFPGGLGDKVEDLTCCHPEREAELSHPSSDSEENEAKGRRATIAISSQEGDNSERTLSNNITVPKIERANSYSAEEPSAPYAHTRKSFSISDKLDRQRNTASLRNPFQRSKSSKPEGRGDSLSMRRLSRTSAFQSFESKHN

SEQ ID NO: 21329 - protein, 57 aa, Artificial Sequence
  Synthetic polypeptide
CSSGSQGSKTDSDVRAREVATESEGMAAGVLECHGPHRHPSVFCRNDPSSPRPALQE

SEQ ID NO: 21330 - protein, 3 aa, Artificial Sequence
  Synthetic polypeptide
DRF

SEQ ID NO: 21331 - protein, 62 aa, Artificial Sequence
  Synthetic polypeptide
MGVVAHTCNSSTLGGRGGQITWGHEFKISLANMTLFQKWQWYQNSSSRPGLLKMKSRNMFKL

SEQ ID NO: 21332 - protein, 206 aa, Artificial Sequence
  Synthetic polypeptide
VQNQPSQHDTFSKMAMVSEFLKQAWFIENEEQEYVQTVKSSKGGPGSAVSPYPTFNPSSDVAALHKAIMVKGVDEATIIDILTKRNNAQRQQIKAAYLQETGKPLDETLKKALTGHLEEVVLALLKTPAQFDADELRAAMKGLGTDEDTLIEILASRTNKEIRDINRVYREELKRDLAKDITSDTSGDFRNALLSLAKGDRSEDFG

SEQ ID NO: 21333 - protein, 19 aa, Artificial Sequence
  Synthetic polypeptide
GHFFKNGNGIRIPQAGLVY

SEQ ID NO: 21334 - protein, 204 aa, Artificial Sequence
  Synthetic polypeptide
LALSPEDTFSKMAMVSEFLKQAWFIENEEQEYVQTVKSSKGGPGSAVSPYPTFNPSSDVAALHKAIMVKGVDEATIIDILTKRNNAQRQQIKAAYLQETGKPLDETLKKALTGHLEEVVLALLKTPAQFDADELRAAMKGLGTDEDTLIEILASRTNKEIRDINRVYREELKRDLAKDITSDTSGDFRNALLSLAKGDRSEDFG

SEQ ID NO: 21335 - protein, 32 aa, Artificial Sequence
  Synthetic polypeptide
VLRTLFQKWQWYQNSSSRPGLLKMKSRNMFKL

SEQ ID NO: 21336 - protein, 19 aa, Artificial Sequence
  Synthetic polypeptide
YDETKGDYEKILVALCGGN

SEQ ID NO: 21337 - protein, 23 aa, Artificial Sequence
  Synthetic polypeptide
YKFNMMKPKEIMRKSWWLFVEET

SEQ ID NO: 21338 - protein, 29 aa, Artificial Sequence
  Synthetic polypeptide
QQLGLVLSAVLGTRWRSWNICPEGVTVAD

SEQ ID NO: 21339 - protein, 253 aa, Artificial Sequence
  Synthetic polypeptide
RCYCGRLIGDHAGIDYSWTISAAKGKESEQWSVEKHTTKSPTDTFGTINFQDGEHTHHAKYIRTSYDTKLDHLLHLMLKEWKMELPKLVISVHGGIQNFTMPSKFKEIFSQGLVKAAETTGAWIITEGINTGVSKHVGDALKSHSSHSLRKIWTVGIPPWGVIENQRDLIGKDVVCLYQTLDNPLSKLTTLNSMHSHFILSDDGTVGKYGNEMKLRRNLEKYLSLQKIHCREYHRGSVTQSGCRPAEVFHGLP

SEQ ID NO: 21340 - protein, 809 aa, Artificial Sequence
  Synthetic polypeptide
RCYCGRLIGDHAGIDYSWTISAAKGKESEQWSVEKHTTKSPTDTFGTINFQDGEHTHHAKYIRTSYDTKLDHLLHLMLKEWKMELPKLVISVHGGIQNFTMPSKFKEIFSQGLVKAAETTGAWIITEGINTGVSKHVGDALKSHSSHSLRKIWTVGIPPWGVIENQRDLIGKDVVCLYQTLDNPLSKLTTLNSMHSHFILSDDGTVGKYGNEMKLRRNLEKYLSLQKIHCRSRQGVPVVGLVVEGGPNVILSVWETVKDKDPVVVCEGTGRAADLLAFTHKHLADEGMLRPQVKEEIICMIQNTFNFSLKQSKHLFQILMECMVHRDCITIFDADSEEQQDLDLAILTALLKGTNLSASEQLNLAMAWDRVDIAKKHILIYEQHWKPDALEQAMSDALVMDRVDFVKLLIEYGVNLHRFLTIPRLEELYNTKQGPTNTLLHHLVQDVKQDLSKNSLWNSRSTNLNRNSLHVIKMPISSLISEISASLKSPQEPHHHYSAIERNNLMRLSQTIPFTPVQLFAGEEITVYRLEESSPLNLDKSMSSWSQRGRAAMIQVLSREEMDGGLRKAMRVVSTWSEDDILKPGQVFIVKSFLPEVVRTWHKIFQESTVLHLCLREIQQQRAAQKLIYTFNQVKPQTIPYTPRFLEVFLIYCHSANQWLTIEKYMTGEFRKYNNNNGDEITPTNTLEELMLAFSHWTYEYTRGELLVLDLQGVGENLTDPSVIKPEVKQSRGMVFGPANLGEDAIRNFIAKHHCNSCCRKLKLPDLKRNDYSPERINSTFGLEIKIESAEEPPARETGRNSPEDDMQL

SEQ ID NO: 21341 - protein, 1897 aa, Artificial Sequence
  Synthetic polypeptide
RCYCGRLIGDHAGIDYSWTISAAKGKESEQWSVEKHTTKSPTDTFGTINFQDGEHTHHAKYIRTSYDTKLDHLLHLMLKEWKMELPKLVISVHGGIQNFTMPSKFKEIFSQGLVKAAETTGAWIITEGINTGVSKHVGDALKSHSSHSLRKIWTVGIPPWGVIENQRDLIGKDVVCLYQTLDNPLSKLTTLNSMHSHFILSDDGTVGKYGNEMKLRRNLEKYLSLQKIHCRSRQGVPVVGLVVEGGPNVILSVWETVKDKDPVVVCEGTGRAADLLAFTHKHLADEGMLRPQVKEEIICMIQNTFNFSLKQSKHLFQILMECMVHRDCITIFDADSEEQQDLDLAILTALLKGTNLSASEQLNLAMAWDRVDIAKKHILIYEQHWKPDALEQAMSDALVMDRVDFVKLLIEYGVNLHRFLTIPRLEELYNTKQGPTNTLLHHLVQDVKQHTLLSGYRITLIDIGLVVEYLIGRAYRSNYTRKHFRALYNNLYRKYKHQRHSSGNRNESAESTLHSQFIRTAQPYKFKEKSIVLHKSRKKSKEQNVSDDPESTGFLYPYNDLLVWAVLMKRQKMAMFFWQHGEEATVKAVIACILYRAMAHEAKESHMVDDASEELKNYSKQFGQLALDLLEKAFKQNERMAMTLLTYELRNWSNSTCLKLAVSGGLRPFVSHTCTQMLLTDMWMGRLKMRKNSWLKIIISIILPPTILTLEFKSKAEMSHVPQSQDFQFMWYYSDQNASSSKESASVKEYDLERGHDEKLDENQHFGLESGHQHLPWTRKVYEFYSAPIVKFWFYTMAYLAFLMLFTYTVLVEMQPQPSVQEWLVSIYIFTNAIEVVREICISEPGKFTQKVKVWISEYWNLTETVAIGLFSAGFVLRWGDPPFHTAGRLIYCIDIIFWFSRLLDFFAVNQHAGPYVTMIAKMTANMFYIVIIMAIVLLSFGVARKAILSPKEPPSWSLARDIVFEPYWMIYGEVYAGEIDVCSSQPSCPPGSFLTPFLQAVYLFVQYIIMVNLLIAFFNNVYLDMESISNNLWKYNRYRYIMTYHEKPWLPPPLILLSHVGLLLRRLCCHRAPHDQEEGDVGLKLYLSKEDLKKLHDFEEQCVEKYFHEKMEDVNCSCEERIRVTSERVTEMYFQLKEMNEKVSFIKDSLLSLDSQVGHLQDLSALTVDTLKVLSAVDTLQEDEALLAKRKHSTCKKLPHSWSNVICAEVLGSMEIAGEKKYQYYSMPSSLLRSLAGGRHPPRVQRGALLEITNSKREATNVRNDQERQETQSSIVVSGVSPNRQAHSKYGQFLLVPSNLKRVPFSAETVLPLSRPSVPDVLATEQDIQTEVLVHLTGQTPVVSDWASVDEPKEKHEPIAHLLDGQDKAEQVLPTLSCTPEPMTMSSPLSQAKIMQTGGGYVNWAFSEGDETGVFSIKKKWQTCLPSTCDSDSSRSEQHQKQAQDSSLSDNSTRSAQSSECSEVGPWLQPNTSFWINPLRRYRPFARSHSFRFHKEEKLMKICKIKNLSGSSEIGQGAWVKAKMLTKDRRLSKKKKNTQGLQVPIITVNACSQSDQLNPEPGENSISEEEYSKNWFTVSKFSHTGVEPYIHQKMKTKEIGQCAIQISDYLKQSQEDLSKNSLWNSRSTNLNRNSLHVIKMPISSLISEISASLKSPQEPHHHYSAIERNNLMRLSQTIPFTPVQLFAGEEITVYRLEESSPLNLDKSMSSWSQRGRAAMIQVLSREEMDGGLRKAMRVVSTWSEDDILKPGQVFIVKSFLPEVVRTWHKIFQESTVLHLCLREIQQQRAAQKLIYTFNQVKPQTIPYTPRFLEVFLIYCHSANQWLTIEKYMTGEFRKYNNNNGDEITPTNTLEELMLAFSHWTYEYTRGELLVLDLQALWFWDSMLKARLGGWRM

SEQ ID NO: 21342 - protein, 1976 aa, Artificial Sequence
  Synthetic polypeptide
RCYCGRLIGDHAGIDYSWTISAAKGKESEQWSVEKHTTKSPTDTFGTINFQDGEHTHHAKYIRTSYDTKLDHLLHLMLKEWKMELPKLVISVHGGIQNFTMPSKFKEIFSQGLVKAAETTGAWIITEGINTGVSKHVGDALKSHSSHSLRKIWTVGIPPWGVIENQRDLIGKDVVCLYQTLDNPLSKLTTLNSMHSHFILSDDGTVGKYGNEMKLRRNLEKYLSLQKIHCRSRQGVPVVGLVVEGGPNVILSVWETVKDKDPVVVCEGTGRAADLLAFTHKHLADEGMLRPQVKEEIICMIQNTFNFSLKQSKHLFQILMECMVHRDCITIFDADSEEQQDLDLAILTALLKGTNLSASEQLNLAMAWDRVDIAKKHILIYEQHWKPDALEQAMSDALVMDRVDFVKLLIEYGVNLHRFLTIPRLEELYNTKQGPTNTLLHHLVQDVKQHTLLSGYRITLIDIGLVVEYLIGRAYRSNYTRKHFRALYNNLYRKYKHQRHSSGNRNESAESTLHSQFIRTAQPYKFKEKSIVLHKSRKKSKEQNVSDDPESTGFLYPYNDLLVWAVLMKRQKMAMFFWQHGEEATVKAVIACILYRAMAHEAKESHMVDDASEELKNYSKQFGQLALDLLEKAFKQNERMAMTLLTYELRNWSNSTCLKLAVSGGLRPFVSHTCTQMLLTDMWMGRLKMRKNSWLKIIISIILPPTILTLEFKSKAEMSHVPQSQDFQFMWYYSDQNASSSKESASVKEYDLERGHDEKLDENQHFGLESGHQHLPWTRKVYEFYSAPIVKFWFYTMAYLAFLMLFTYTVLVEMQPQPSVQEWLVSIYIFTNAIEVVREICISEPGKFTQKVKVWISEYWNLTETVAIGLFSAGFVLRWGDPPFHTAGRLIYCIDIIFWFSRLLDFFAVNQHAGPYVTMIAKMTANMFYIVIIMAIVLLSFGVARKAILSPKEPPSWSLARDIVFEPYWMIYGEVYAGEIDVCSSQPSCPPGSFLTPFLQAVYLFVQYIIMVNLLIAFFNNVYLDMESISNNLWKYNRYRYIMTYHEKPWLPPPLILLSHVGLLLRRLCCHRAPHDQEEGDVGLKLYLSKEDLKKLHDFEEQCVEKYFHEKMEDVNCSCEERIRVTSERVTEMYFQLKEMNEKVSFIKDSLLSLDSQVGHLQDLSALTVDTLKVLSAVDTLQEDEALLAKRKHSTCKKLPHSWSNVICAEVLGSMEIAGEKKYQYYSMPSSLLRSLAGGRHPPRVQRGALLEITNSKREATNVRNDQERQETQSSIVVSGVSPNRQAHSKYGQFLLVPSNLKRVPFSAETVLPLSRPSVPDVLATEQDIQTEVLVHLTGQTPVVSDWASVDEPKEKHEPIAHLLDGQDKAEQVLPTLSCTPEPMTMSSPLSQAKIMQTGGGYVNWAFSEGDETGVFSIKKKWQTCLPSTCDSDSSRSEQHQKQAQDSSLSDNSTRSAQSSECSEVGPWLQPNTSFWINPLRRYRPFARSHSFRFHKEEKLMKICKIKNLSGSSEIGQGAWVKAKMLTKDRRLSKKKKNTQGLQVPIITVNACSQSDQLNPEPGENSISEEEYSKNWFTVSKFSHTGVEPYIHQKMKTKEIGQCAIQISDYLKQSQEDLSKNSLWNSRSTNLNRNSLHVIKMPISSLISEISASLKSPQEPHHHYSAIERNNLMRLSQTIPFTPVQLFAGEEITVYRLEESSPLNLDKSMSSWSQRGRAAMIQVLSREEMDGGLRKAMRVVSTWSEDDILKPGQVFIVKSFLPEVVRTWHKIFQESTVLHLCLREIQQQRAAQKLIYTFNQVKPQTIPYTPRFLEVFLIYCHSANQWLTIEKYMTGEFRKYNNNNGDEITPTNTLEELMLAFSHWTYEYTRGELLVLDLQGVGENLTDPSVIKPEVKQSRGMVFGPANLGEDAIRNFIAKHHCNSCCRKLKLPDLKRNDYSPERINSTFGLEIKIESAEEPPARETGRNSPEDDMQL

SEQ ID NO: 21343 - protein, 1972 aa, Artificial Sequence
  Synthetic polypeptide
RCYCGRLIGDHAGIDYSWTISAAKGKESEQWSVEKHTTKSPTDTFGTINFQDGEHTHHAKYIRTSYDTKLDHLLHLMLKEWKMELPKLVISVHGGIQNFTMPSKFKEIFSQGLVKAAETTGAWIITEGINTGVSKHVGDALKSHSSHSLRKIWTVGIPPWGVIENQRDLIGKDVVCLYQTLDNPLSKLTTLNSMHSHFILSDDGTVGKYGNEMKLRRNLEKYLSLQKIHCRSRQGVPVVGLVVEGGPNVILSVWETVKDKDPVVVCEGTGRAADLLAFTHKHLADEGMLRPQVKEEIICMIQNTFNFSLKQSKHLFQILMECMVHRDCITIFDADSEEQQDLDLAILTALLKGTNLSASEQLNLAMAWDRVDIAKKHILIYEQHWKPDALEQAMSDALVMDRVDFVKLLIEYGVNLHRFLTIPRLEELYNTKQGPTNTLLHHLVQDVKQHTLLSGYRITLIDIGLVVEYLIGRAYRSNYTRKHFRALYNNLYRKYKHQRHSSGNRNESAESTLHSQFIRTAQPYKFKEKSIVLHKSRKKSKEQNVSDDPESTGFLYPYNDLLVWAVLMKRQKMAMFFWQHGEEATVKAVIACILYRAMAHEAKESHMVDDASEELKNYSKQFGQLALDLLEKAFKQNERMAMTLLTYELRNWSNSTCLKLAVSGGLRPFVSHTCTQMLLTDMWMGRLKMRKNSWLKIIISIILPPTILTLEFKSKAEMSHVPQSQDFQFMWYYSDQNASSSKESASVKEYDLERGHDEKLDENQHFGLESGHQHLPWTRKVYEFYSAPIVKFWFYTMAYLAFLMLFTYTVLVEMQPQPSVQEWLVSIYIFTNAIEVVREICISEPGKFTQKVKVWISEYWNLTETVAIGLFSAGFVLRWGDPPFHTAGRLIYCIDIIFWFSRLLDFFAVNQHAGPYVTMIAKMTANMFYIVIIMAIVLLSFGVARKAILSPKEPPSWSLARDIVFEPYWMIYGEVYAGEIDVCSSQPSCPPGSFLTPFLQAVYLFVQYIIMVNLLIAFFNNVYLDMESISNNLWKYNRYRYIMTYHEKPWLPPPLILLSHVGLLLRRLCCHRAPHDQEEGDVGLKLYLSKEDLKKLHDFEEQCVEKYFHEKMEDVNCSCEERIRVTSERVTEMYFQLKEMNEKVSFIKDSLLSLDSQVGHLQDLSALTVDTLKVLSAVDTLQEDEALLAKRKHSTCKKLPHSWSNVICAEVLGSMEIAGEKKYQYYSMPSSLLRSLAGGRHPPRVQRGALLEITNSKREATNVRNDQERQETQSSIVVSGVSPNRQAHSKYGQFLLVPSNLKRVPFSAETVLPLSRPSVPDVLATEQDIQTEVLVHLTGQTPVVSDWASVDEPKEKHEPIAHLLDGQDKAEQVLPTLSCTPEPMTMSSPLSQAKIMQTGGGYVNWAFSEGDETGVFSIKKKWQTCLPSTCDSDSSRSEQHQKQAQDSSLSDNSTRSAQSSECSEVGPWLQPNTSFWINPLRRYRPFARSHSFRFHKEEKLMKICKIKNLSGSSEIGQGAWVKAKMLTKDRRLSKKKKNTQGLQVPIITVNACSQSDQLNPEPGENSISEEEYSKNWFTVSKFSHTGVEPYIHQKMKTKEIGQCAIQISDYLKQSQEDLSKNSLWNSRSTNLNRNSLLKSSIGVDKISASLKSPQEPHHHYSAIERNNLMRLSQTIPFTPVQLFAGEEITVYRLEESSPLNLDKSMSSWSQRGRAAMIQVLSREEMDGGLRKAMRVVSTWSEDDILKPGQVFIVKSFLPEVVRTWHKIFQESTVLHLCLREIQQQRAAQKLIYTFNQVKPQTIPYTPRFLEVFLIYCHSANQWLTIEKYMTGEFRKYNNNNGDEITPTNTLEELMLAFSHWTYEYTRGELLVLDLQGVGENLTDPSVIKPEVKQSRGMVFGPANLGEDAIRNFIAKHHCNSCCRKLKLPDLKRNDYSPERINSTFGLEIKIESAEEPPARETGRNSPEDDMQL

SEQ ID NO: 21344 - protein, 927 aa, Artificial Sequence
  Synthetic polypeptide
RCYCGRLIGDHAGIDYSWTISAAKGKESEQWSVEKHTTKSPTDTFGTINFQDGEHTHHAKYIRTSYDTKLDHLLHLMLKEWKMELPKLVISVHGGIQNFTMPSKFKEIFSQGLVKAAETTGAWIITEGINTGVSKHVGDALKSHSSHSLRKIWTVGIPPWGVIENQRDLIGKDVVCLYQTLDNPLSKLTTLNSMHSHFILSDDGTVGKYGNEMKLRRNLEKYLSLQKIHCRSRQGVPVVGLVVEGGPNVILSVWETVKDKDPVVVCEGTGRAADLLAFTHKHLADEGMLRPQVKEEIICMIQNTFNFSLKQSKHLFQILMECMVHRDCITIFDADSEEQQDLDLAILTALLKGTNLSASEQLNLAMAWDRVDIAKKHILIYEQHWKPDALEQAMSDALVMDRVDFVKLLIEYGVNLHRFLTIPRLEELYNTKQGPTNTLLHHLVQDVKQHTLLSGYRITLIDIGLVVEYLIGRAYRSNYTRKHFRALYNNLYRKYKIITVNACSQSDQLNPEPGENSISEEEYSKNWFTVSKFSHTGVEPYIHQKMKTKEIGQCAIQISDYLKQSQEDLSKNSLWNSRSTNLNRNSLHVIKMPISSLISEISASLKSPQEPHHHYSAIERNNLMRLSQTIPFTPVQLFAGEEITVYRLEESSPLNLDKSMSSWSQRGRAAMIQVLSREEMDGGLRKAMRVVSTWSEDDILKPGQVFIVKSFLPEVVRTWHKIFQESTVLHLCLREIQQQRAAQKLIYTFNQVKPQTIPYTPRFLEVFLIYCHSANQWLTIEKYMTGEFRKYNNNNGDEITPTNTLEELMLAFSHWTYEYTRGELLVLDLQGVGENLTDPSVIKPEVKQSRGMVFGPANLGEDAIRNFIAKHHCNSCCRKLKLPDLKRNDYSPERINSTFGLEIKIESAEEPPARETGRNSPEDDMQL

SEQ ID NO: 21345 - protein, 44 aa, Artificial Sequence
  Synthetic polypeptide
VWYYLRFWAPAGGLGTYALKVLLWPTDWRPCWDRLFLDHLSCQG

SEQ ID NO: 21346 - protein, 36 aa, Artificial Sequence
  Synthetic polypeptide
LIFIPGFLMHVQKNEAIAINLLILLAEEKLCRLMHN

SEQ ID NO: 21347 - protein, 15 aa, Artificial Sequence
  Synthetic polypeptide
QKKNFAGSCTISSRS

SEQ ID NO: 21348 - protein, 104 aa, Artificial Sequence
  Synthetic polypeptide
SVNSLSRRKTLQAHAQLVREVDVEKVSAFENPYVDAIKSLWNDPGIQECYDRRREYQLSDSTKYYLNDLDRVADPAYLPTQQDVLRVRVPTTGIIEYPFDLQSV

SEQ ID NO: 21349 - protein, 264 aa, Artificial Sequence
  Synthetic polypeptide
SVNSLSRRKTLQAHAQLVREVDVEKVSAFENPYVDAIKSLWNDPGIQECYDRRREYQLSDSTKYYLNDLDRVADPAYLPTQQDVLRVRVPTTGIIEYPFDLQSVIFRMVDVGGQRSERRKWIHCFENVTSIMFLVALSEYDQVLVESDNENRMEESKALFRTIITYPWFQNSSVILFLNKKDLLEEKIMYSHLVDYFPEYDGPQRDAQAAREFILKMFVDLNPDSDKIIYSHFTCATDTENIRFVFAAVKDTILQLNLKEYNLV

SEQ ID NO: 21350 - protein, 15 aa, Artificial Sequence
  Synthetic polypeptide
MKSAWDLNNQQRYPE

SEQ ID NO: 21351 - protein, 44 aa, Artificial Sequence
  Synthetic polypeptide
RKGPSPASIQHLLNEERLGPEQPAAIPRMKKTFLRTRTHQETTQ

SEQ ID NO: 21352 - protein, 678 aa, Artificial Sequence
  Synthetic polypeptide
TTSSDTQNEENFLENENTSGNNSIRSRAVQSREHTNTKQDEEQVTVEQDSPRNREHMEDDDEEMQQKGCLERRYDTVCGFCRKHKTTLRHIIWGILLAGYLVMVISACVLNFHRALPLFVITVAAIFFVVWDHLMAKYEHRIDEMLSPGRRLLNSHWFWLKWVIWSSLVLAVIFWLAFDTAKLGQQQLVSFGGLIMYIVLLFLFSKYPTRVYWRPVLWGIGLQFLLGLLILRTDPGFIAFDWLGRQVQTFLEYTDAGASFVFGEKYKDHFFAFKVLPIVVFFSTVMSMLYYLGLMQWIIRKVGWIMLVTTGSSPIESVVASGNIFVGQTESPLLVRPYLPYITKSELHAIMTAGFSTIAGSVLGAYISFGVPSSHLLTASVMSAPASLAAAKLFWPETEKPKITLKNAMKMESGDSGNLLEAATQGASSSISLVANIAVNLIAFLALLSFMNSALSWFGNMFDYPQLSFELICSYIFMPFSFMMGVEWQDSFMVARLIGYKTFFNEFVAYEHLSKWIHLRKEGGPKFVNGVQQYISIRSEIIATYALCGFANIGSLGIVIGGLTSMAPSRKRDIASGAVRALIAGTVACFMTACIAGILSSTPVDINCHHVLENAFNSTFPGNTTKVIACCQSLLSSTVAKGPGEVIPGGNHSLYSLKGCCTLLNPSTFNCNGISNTF

SEQ ID NO: 21353 - protein, 37 aa, Artificial Sequence; identical to SEQ ID NO: 6018
  Synthetic polypeptide

SEQ ID NO: 21354 - protein, 706 aa, Artificial Sequence; identical to SEQ ID NO: 1747
  Synthetic polypeptide

SEQ ID NO: 21355 - protein, 421 aa, Artificial Sequence; identical to SEQ ID NO: 2193
  Synthetic polypeptide

SEQ ID NO: 21356 - protein, 345 aa, Artificial Sequence; identical to SEQ ID NO: 2361
  Synthetic polypeptide

SEQ ID NO: 21357 - protein, 690 aa, Artificial Sequence; identical to SEQ ID NO: 1777
  Synthetic polypeptide

SEQ ID NO: 21358 - protein, 405 aa, Artificial Sequence; identical to SEQ ID NO: 2240
  Synthetic polypeptide

SEQ ID NO: 21359 - protein, 22 aa, Artificial Sequence
  Synthetic polypeptide
SPVLSAYRRCSDPGGQSIYMLL

SEQ ID NO: 21360 - protein, 4 aa, Artificial Sequence
  Synthetic polypeptide
GRIL

SEQ ID NO: 21361 - protein, 53 aa, Artificial Sequence
  Synthetic polypeptide
NLDSIKNTTKISRLWWCASVVPAMLRKNPVSTIPSILLLMTPALWTSLSRRRP

SEQ ID NO: 21362 - protein, 140 aa, Artificial Sequence
  Synthetic polypeptide
PAVVVCVCGPSYAEEESCKYNPKYSVANDTGFVDIPKQEKALMKAVATVGPISVAIDAGHESFLFYKEGIYFEPDCSSEDMDHGVLVVGYGFESTESDNNKYWLVKNSWGEEWGMGGYVKMAKDRRNHCGIASAASYPTV

SEQ ID NO: 21363 - protein, 125 aa, Artificial Sequence
  Synthetic polypeptide
ESCKYNPKYSVANDTGFVDIPKQEKALMKAVATVGPISVAIDAGHESFLFYKEGIYFEPDCSSEDMDHGVLVVGYGFESTESDNNKYWLVKNSWGEEWGMGGYVKMAKDRRNHCGIASAASYPTV

SEQ ID NO: 21364 - protein, 28 aa, Artificial Sequence
  Synthetic polypeptide
NLDSIKNTTKISRLWWCASVVPAMLRIL

SEQ ID NO: 21365 - protein, 40 aa, Artificial Sequence
  Synthetic polypeptide
PAVVVCVCGPSYAENPVSTIPSILLLMTPALWTSLSRRRP

SEQ ID NO: 21366 - protein, 569 aa, Artificial Sequence
  Synthetic polypeptide
DGELYSGTSYNFLGSEPIISRNSSHSPLRTEYAIPWLNEPSFVFADVIRKSPDSPDGEDDRVYFFFTEVSVEYEFVFRVLIPRIARVCKGDQGGLRTLQKKWTSFLKARLICSRPDSGLVFNVLRDVFVLRSPGLKVPVFYALFTPQLNNVGLSAVCAYNLSTAEEVFSHGKYMQSTTVEQSHTKWVRYNGPVPKPRPGACIDSEARAANYTSSLNLPDKTLQFVKDHPLMDDSVTPIDNRPRLIKKDVNYTQIVVDRTQALDGTVYDVMFVSTDRGALHKAISLEHAVHIIEETQLFQDFEPVQTLLLSSKKGNRFVYAGSNSGVVQAPLAFCGKHGTCEDCVLARDPYCAWSPPTATCVALHQTESPSRGLIQEMSGDASVCPASSPKPLPPPGSSSLSCLGHVGDRRLSSPWTPWPASGAGPDSSSRVSLLPPFLSDQAQHVHALGNFYLFCQATGPADIRFVWEKNGRALETCVPVQTHALPDGRAHALSWLQDAIRESAEYRCSVLSSAGNKTSKVQVAVMRPEVTHQERWTRELSAWRAVAGEHDRMMQSWRKAWESCSKDTL

SEQ ID NO: 21367 - protein, 693 aa, Artificial Sequence
  Synthetic polypeptide
DGELYSGTSYNFLGSEPIISRNSSHSPLRTEYAIPWLNEPSFVFADVIRKSPDSPDGEDDRVYFFFTEVSVEYEFVFRVLIPRIARVCKGDQGGLRTLQKKWTSFLKARLICSRPDSGLVFNVLRDVFVLRSPGLKVPVFYALFTPQLNNVGLSAVCAYNLSTAEEVFSHGKYMQSTTVEQSHTKWVRYNGPVPKPRPGACIDSEARAANYTSSLNLPDKTLQFVKDHPLMDDSVTPIDNRPRLIKKDVNYTQIVVDRTQALDGTVYDVMFVSTDRGALHKAISLEHAVHIIEETQLFQDFEPVQTLLLSSKKGNRFVYAGSNSGVVQAPLAFCGKHGTCEDCVLARDPYCAWSPPTATCVALHQTESPSRGLIQEMSGDASVCPDKSKGSYRQHFFKHGGTAELKCSQKSNLARVFWKFQNGVLKAESPKYGLMGRKNLLIFNLSEGDSGVYQCLSEERVKNKTVFQVVAKHVLEVKVVPKPVVAPTLSVVQTEGSRIATKVLVASTQGSSPPTPAVQATSSGAITLPPKPAPTGTSCEPKIVINTVPQLHSEKTMYLKSSDNRLLMSLFLFFFVLFLCLFFYNCYKGYLPRQCLKFRSALLIGKKKPKSDFCDREQSLKETLVEPGSFSQQNGEHPKPALDTGYETEQDTITSKVPTDREDSQRIDDLSARDKPFDVKCELKFADSDADGD

SEQ ID NO: 21368 - protein, 379 aa, Artificial Sequence
  Synthetic polypeptide
DGELYSGTSYNFLGSEPIISRNSSHSPLRTEYAIPWLNEPSFVFADVIRKSPDSPDGEDDRVYFFFTEVSVEYEFVFRVLIPRIARVCKGDQGGLRTLQKKWTSFLKARLICSRPDSGLVFNVLRDVFVLRSPGLKVPVFYALFTPQLNNVGLSAVCAYNLSTAEEVFSHGKYMQSTTVEQSHTKWVRYNGPVPKPRPGACIDSEARAANYTSSLNLPDKTLQFVKDHPLMDDSVTPIDNRPRLIKKDVNYTQIVVDRTQALDGTVYDVMFVSTDRGALHKAISLEHAVHIIEETQLFQDFEPVQTLLLSSKKVLQTFALSGRRMGELWRPVSLCRPMHCPMAGPMHSAGCRTPSGKALSIAALSSPQQGTRLRRCRLL

SEQ ID NO: 21369 - protein, 13 aa, Artificial Sequence
  Synthetic polypeptide
DHLRWRTLFGDVV

SEQ ID NO: 21370 - protein, 30 aa, Artificial Sequence
  Synthetic polypeptide
SLEMENFIRGRRIIFWEVNPSSPEILPTVL

SEQ ID NO: 21371 - protein, 7 aa, Artificial Sequence
  Synthetic polypeptide
CQGCTEH

SEQ ID NO: 21372 - protein, 994 aa, Artificial Sequence
  Synthetic polypeptide
NTSSAKVAQSIEDHHQEVIGFCRENGFHGLVAYDSDYALCNIPYYFSAHALKLSRNGKSLTTSQYLMHEVAKQLDLNPNRFPIFAALLGNHILPDEDLASFHWSLLGPEHPLASLKVRAHQLVLPPCDVVIKAVADYVRNIQDTSDLDAIAKDVFQHSQSRTDDKVIRFKRAIGYYSATSKPMSFHPPHYLAARPGPFGMPGMVPPHVPPQMLNIPQTSLQAKPVAPQVPSPGGAPGQGPYPYSLSEPAPLTLDTSGKNLTEQNSYSNIPHEGKHTPLYERSSPINPAQSGSPNHVDSAYFPGSSTSSSSDNDEGSGGATKPFQLYLQKNFVFHKENSIVLCSRILRHGHISGNKIGWEKTGSHSEPQARGDPGDQTKAEGSSTASSGSQLAEGKGSQMGTVQPIPCLLSMPTRNHMDITTPPLPPVAPEVLRVAEHRHKKGLMYPYIFHVLTKGEIKIAVSIEDEANKDLPPAALLYRPVRQYVYGVLFSLAESRKKTERLAFRKNRLPPEFSPVIIKEWAAYKGKSPQTPELVEALAFREWTCPNLKRLWLGKAVEDKNRRMRAFLACMRSDTPAMLNPANVPTHLMVLCCVLRYMVQWPGARILRRQELDAFLAQALSPKLYEPDQLQELKIENLDPRGIQLSALFMSGVDMALFANDACGQPIPWEHCCPWMYFDGKLFQSKLLKASREKTPLIDLCDGQADQAAKVEKMRQSVLEGLSFSRQSHTLPFPPPPALPFYPASAYPRHFGPVPPSQGRGRGFAGVCGFGGPYGETVATGPYRAFRVAAASGHCGAFSGSDSSRTSKSQGGVQPIPSQGGKLEIAGTVVGHWAGSRRGRGGRGPFPLQVVSVGGPARGRPRGVISTPVIRTFGRGGRYYGRGYKNQAAIQGRPPYAASAEEVAKELKSKSGESKSSAMSSDGSLAENGVMAEEKPAPQMNGSTGDARAPSHSESALNNDSKTCNTNPHLNALSTDSACRREAALEAAVLNKEE

SEQ ID NO: 21373 - protein, 499 aa, Artificial Sequence
  Synthetic polypeptide
NTSSAKVAQSIEDHHQEVIGFCRENGFHGLVAYDSDYALCNIPYYFSAHALKLSRNGKSLTTSQYLMHEVAKQLDLNPNRFPIFAALLGNHILPDEDLASFHWSLLGPEHPLASLKVRAHQLVLPPCDVVIKAVADYVRNIQDTSDLDAIAKDVFQHSQSRTDDKVIRFKRAIGYYSATSKPMSFHPPHYLAARPGPFGMPGMVPPHVPPQMLNIPQTSLQAKPVAPQVPSPGGAPGQGPYPYSLSEPAPLTLDTSGKNLTEQNSYSNIPHEGKHTPLYERSSPINPAQSGSPNHVDSAYFPGSSTSSSSDNDEGSGGATNHISGNKIGWEKTGSHSEPQARGDPGDQTKAEGSSTASSGSQLAEGKGSQMGTVQPIPCLLSMPTRNHMDITTPPLPPVAPEVLRVAEHRHKKGLMYPYIFHVLTKGEIKIAVSIEDEANKDLPPAALLYRPVRQYVYGVLFSLAESRKKTERLAFRKNRLPPECMYCNNPLFVFLGTS

SEQ ID NO: 21374 - protein, 966 aa, Artificial Sequence
  Synthetic polypeptide
NTSSAKVAQSIEDHHQEVIGFCRENGFHGLVAYDSDYALCNIPYYFSAHALKLSRNGKSLTTSQYLMHEVAKQLDLNPNRFPIFAALLGNHILPDEDLASFHWSLLGPEHPLASLKVRAHQLVLPPCDVVIKAVADYVRNIQDTSDLDAIAKDVFQHSQSRTDDKVIRFKRAIGYYSATSKPMSFHPPHYLAARPGPFGMPGMVPPHVPPQMLNIPQTSLQAKPVAPQVPSPGGAPGQGPYPYSLSEPAPLTLDTSGKNLTEQNSYSNIPHEGKHTPLYERSSPINPAQSGSPNHVDSAYFPGSSTSSSSDNDEGSGGATNHISGNKIGWEKTGSHSEPQARGDPGDQTKAEGSSTASSGSQLAEGKGSQMGTVQPIPCLLSMPTRNHMDITTPPLPPVAPEVLRVAEHRHKKGLMYPYIFHVLTKGEIKIAVSIEDEANKDLPPAALLYRPVRQYVYGVLFSLAESRKKTERLAFRKNRLPPEFSPVIIKEWAAYKGKSPQTPELVEALAFREWTCPNLKRLWLGKAVEDKNRRMRAFLACMRSDTPAMLNPANVPTHLMVLCCVLRYMVQWPGARILRRQELDAFLAQALSPKLYEPDQLQELKIENLDPRGIQLSALFMSGVDMALFANDACGQPIPWEHCCPWMYFDGKLFQSKLLKASREKTPLIDLCDGQADQAAKVEKMRQSVLEGLSFSRQSHTLPFPPPPALPFYPASAYPRHFGPVPPSQGRGRGFAGVCGFGGPYGETVATGPYRAFRVAAASGHCGAFSGSDSSRTSKSQGGVQPIPSQGGKLEIAGTVVGHWAGSRRGRGGRGPFPLQVVSVGGPARGRPRGVISTPVIRTFGRGGRYYGRGYKNQAAIQGRPPYAASAEEVAKELKSKSGESKSSAMSSDGSLAENGVMAEEKPAPQMNGSTGDARAPSHSESALNNDSKTCNTNPHLNALSTDSACRREAALEAAVLNKEE

SEQ ID NO: 21375 - protein, 920 aa, Artificial Sequence
  Synthetic polypeptide
NTSSAKVAQSIEDHHQEVIGFCRENGFHGLVAYDSDYALCNIPYYFSAHALKLSRNGKSLTTSQYLMHEVAKQLDLNPNRFPIFAALLGNHILPDEDLASFHWSLLGPEHPLASLKVRAHQLVLPPCDVVIKAVADYVRNIQDTSDLDAIAKDVFQHSQSRTDDKVIRFKRAIGYYSATSKPMSFHPPHYLAARPGPFGMPGMVPPHVPPQMLNIPQTSLQAKPVAPQVPSPGGAPGQGPYPYSLSEPAPLTLDTSGKNLTEQNSYSNIPHEGKHTPLYERSSPINPAQSGSPNHVDSAYFPGSSTSSSSDNDEGSGGATNHISGNKIGWEKTGSHSEPQARGDPGDQTKAEGSSTASSGSQLAEGKGSQMGTVQPIPCLLSMPTRNHMDITTPPLPPVAPEVLRVAEHRHKKGLMYPYIFHVLTKGEIKIAVSIEDEANKDLPPAALLYRPVRQYVYGVLFSLAESRKKTERLAFRKNRLPPEFSPVIIKEWAAYKGKSPQTPELVEALAFREWTCPNLKRLWLGKAVEDKNRRMRAFLACMRSDTPAMLNPANVPTHLMVLCCVLRYMVQWPGARILRRQELDAFLAQALSPKLYEPDQLQELKIENLDPRGIQLSALFMSGVDMALFANDACGQPIPWEHCCPWMYFDGKLFQSKLLKASREKTPLIDLCDGQADQAAKVEKMRQSVLEGLSFSRQSHTLPFPPPPALPFYPASAYPRHFGPVPPSQGRGRGFAGVQPIPSQGGKLEIAGTVVGHWAGSRRGRGGRGPFPLQVVSVGGPARGRPRGVISTPVIRTFGRGGRYYGRGYKNQAAIQGRPPYAASAEEVAKELKSKSGESKSSAMSSDGSLAENGVMAEEKPAPQMNGSTGDARAPSHSESALNNDSKTCNTNPHLNALSTDSACRREAALEAAVLNKEE

SEQ ID NO: 21376 - protein, 476 aa, Artificial Sequence
  Synthetic polypeptide
NTSSAKVAQSIEDHHQEVIGFCRENGFHGLVAYDSDYALCNIPYYFSAHALKLSRNGKSLTTSQYLMHEVAKQLDLNPNRFPIFAALLGNHILPDEDLASFHWSLLGPEHPLASLKVRAHQLVLPPCDVVIKAVADYVRNIQDTSDLDAIAKDVFQHSQSRTDDKVIRFKRAIGYYSATSKPMSFHPPHYLAARPGPFGMPGMVPPHVPPQMLNIPQTSLQAKPVAPQVPSPGGAPGQGPYPYSLSEPAPLTLDTSGKNLTEQNSYSNIPHEGKHTPLYERSSPINPAQSGSPNHVDSAYFPGSSTSSSSDNDEGSGGATNHISGNKIGWEKTGSHSEPQARGDPGDQTKAEGSSTASSGSQLAEGKGSQMGTVQPIPCLLSMPTRNHMDITTPPLPPVAPEVLRVAEHRHKKGLMYPYIFHVLTKVLSKGPWSGFCYLMSGHSYGCFVLLSFFEPFFCLTNLLETKFTFPFLNIE

SEQ ID NO: 21377 - protein, 24 aa, Artificial Sequence
  Synthetic polypeptide
QRIMWPKIPVVPRLHRALRITIRK

SEQ ID NO: 21378 - protein, 49 aa, Artificial Sequence
  Synthetic polypeptide
KLARSPTYTFSGRQTRNSWHCGWPLGWEQAGPWGPGAFPPAGGFCRRTS

SEQ ID NO: 21379 - protein, 184 aa, Artificial Sequence
  Synthetic polypeptide
PGVQPIPSQGGKLEIAGTVVGHWAGSRRGRGGRGPFPLQVVSVGGPARGRPRGVISTPVIRTFGRGGRYYGRGYKNQAAIQGRPPYAASAEEVAKELKSKSGESKSSAMSSDGSLAENGVMAEEKPAPQMNGSTGDARAPSHSESALNNDSKTCNTNPHLNALSTDSACRREAALEAAVLNKEE

SEQ ID NO: 21380 - protein, 49 aa, Artificial Sequence
  Synthetic polypeptide
SQHFGRPRRENCLRQEFKTSLGNIVRPLPLQKILKISQESNLYLLREAN

SEQ ID NO: 21381 - protein, 19 aa, Artificial Sequence
  Synthetic polypeptide
TQPGQHENCNHFRPWHCDI

SEQ ID NO: 21382 - protein, 378 aa, Artificial Sequence
  Synthetic polypeptide
WAWWLMPVIPAFWKAKAGGLLEPSPGNMKTVTISDHGTVTYNGSICGDDQNGPKIAVQFGPGFSWIANFTKAASTYSIDSVSFSYNTGDNTTFPDAEDKGILTVDELLAIRIPLNDLFRCNSLSTLEKNDVVQHYWDVLVQAFVQNGTVSTNEFLCDKDKTSTVAPTIHTTVPSPTTTPTPKEKPEAGTYSVNNGNDTCLLATMGLQLNITQDKVASVININPNTTHSTGSCRSHTALLRLNSSTIKYLDFVFAVKNENRFYLKEVNISMYLVNGSVFSIANNNLSYWDAPLGSSYMCNKEQTVSVSGAFQINTFDLRVQPFNVTQGKYSTAEECSADSDLNFLIPVAVGVALGFLIIVVFISYMIGRRKSRTGYQSV

SEQ ID NO: 21383 - protein, 377 aa, Artificial Sequence
  Synthetic polypeptide
WAWWLMPVIPAFWKAKAGGLLEPSPGNMKTVTISDHGTVTYNGSICGDDQNGPKIAVQFGPGFSWIANFTKAASTYSIDSVSFSYNTGDNTTFPDAEDKGILTVDELLAIRIPLNDLFRCNSLSTLEKNDVVQHYWDVLVQAFVQNGTVSTNEFLCDKDKTSTVAPTIHTTVPSPTTTPTPKEKPEAGTYSVNNGNDTCLLATMGLQLNITQDKVASVININPNTTHSTGSCRSHTALLRLNSSTIKYLDFVFAVKNENRFYLKEVNISMYLVNGSVFSIANNNLSYWDAPLGSSYMCNKEQTVSVSGAFQINTFDLRVQPFNVTQGKYSTAQDCSADDDNFLVPIAVGAALAGVLILVLLAYFIGLKHHHAGYEQF

SEQ ID NO: 21384 - protein, 377 aa, Artificial Sequence
  Synthetic polypeptide
WAWWLMPVIPAFWKAKAGGLLEPSPGNMKTVTISDHGTVTYNGSICGDDQNGPKIAVQFGPGFSWIANFTKAASTYSIDSVSFSYNTGDNTTFPDAEDKGILTVDELLAIRIPLNDLFRCNSLSTLEKNDVVQHYWDVLVQAFVQNGTVSTNEFLCDKDKTSTVAPTIHTTVPSPTTTPTPKEKPEAGTYSVNNGNDTCLLATMGLQLNITQDKVASVININPNTTHSTGSCRSHTALLRLNSSTIKYLDFVFAVKNENRFYLKEVNISMYLVNGSVFSIANNNLSYWDAPLGSSYMCNKEQTVSVSGAFQINTFDLRVQPFNVTQGKYSTAQECSLDDDTILIPIIVGAGLSGLIIVIVIAYVIGRRKSYAGYQTL

SEQ ID NO: 21385 - protein, 1369 aa, Artificial Sequence
  Synthetic polypeptide
QKKMLVRLEWPTDLAVNPMDNSLYVLDNNIVLQISENRRVRIIAGRPIHCQVPGIDHFLVSKVAIHSTLESARAISVSHSGLLFIAETDERKVNRIQQVTTNGEIYIIAGAPTDCDCKIDPNCDCFSGDGGYAKDAKMKAPSSLAVSPDGTLYVADLGNVRIRTISRNQAHLNDMNIYEIASPADQELYQFTVNGTHLHTLNLITRDYVYNFTYNSEGDLGAITSSNGNSVHIRRDAGGMPLWLVVPGGQVYWLTISSNGVLKRVSAQGYNLALMTYPGNTGLLATKSNENGWTTVYEYDPEGHLTNATFPTGEVSSFHSDLEKLTKVELDTSNRENVLMSTNLTATSTIYILKQENTQSTYRVNPDGSLRVTFASGMEIGLSSEPHILAGAVNPTLGKCNISLPGEHNANLIEWRQRKEQNKGNVSAFERRLRAHNRNLLSIDFDHITRTGKIYDDHRKFTLRILYDQTGRPILWSPVSRYNEVNITYSPSGLVTFIQRGTWNEKMEYDQSGKIISRTWADGKIWSYTYLEKSVMLLLHSQRRYIFEYDQPDCLLSVTMPSMVRHSLQTMLSVGYYRNIYTPPDSSTSFIQDYSRDGRLLQTLHLGTGRRVLYKYTKQARLSEVLYDTTQVTLTYEESSGVIKTIHLMHDGFICTIRYRQTGPLIGRQIFRFSEEGLVNARFDYSYNNFRVTSMQAVINETPLPIDLYRYVDVSGRTEQFGKFSVINYDLNQVITTTVMKHTKIFSANGQVIEVQYEILKAIAYWMTIQYDNVGRMVICDIRVGVDANITRYFYEYDADGQLQTVSVNDKTQWRYSYDLNGNINLLSHGKSARLTPLRYDLRDRITRLGEIQYKMDEDGFLRQRGNDIFEYNSNGLLQKAYNKASGWTVQYYYDGLGRRVASKSSLGQHLQFFYADLTNPIRVTHLYNHTSSEITSLYYDLQGHLIAMELSSGEEYYVACDNTGTPLAVFSSRGQVIKEILYTPYGDIYHDTYPDFQVIIGFHGGLYDFLTKLVHLGQRDYDVVAGRWTTPNHHIWKQLNLLPKPFNLYSFENNYPVGKIQDVAKYTTDIRSWLELFGFQLHNVLPGFPKPELENLELTYELLRLQTKTQEWDPGKTILGIQCELQKQLRNFISLDQLPMTPRYNDGRCLEGGKQPRFAAVPSVFGKGIKFAIKDGIVTADIIGVANEDSRRLAAILNNAHYLENLHFTIEGRDTHYFIKLGSLEEDLVLIGNTGGRRILENGVNVTVSQMTSVLNGRTRRFADIQLQHGALCFNIRYGTTVEEEKNHVLEIARQRAVAQAWTKEQRRLQEGEEGIRAWTEGEKQQLLSTGRVQGYDGYFVLSVEQYLELSDSANNIHFMRQSEIGRR

SEQ ID NO: 21386 - protein, 31 aa, Artificial Sequence
  Synthetic polypeptide
QRNANQNHNEISSHPSWNGCYQNDKKKCWCD

SEQ ID NO: 21387 - protein, 50 aa, Artificial Sequence
  Synthetic polypeptide
REMQIKTTMRYHLTPVGMAVIRMTKKNAGAIRVANRPCSKSYGQFIVCLG

SEQ ID NO: 21388 - protein, 2567 aa, Artificial Sequence
  Synthetic polypeptide
ATQKTADFCISIRDVQSSPHNQFTFRPLPPPPPPPHACTCARKPPPAADSLQRRSMTTRSQPSPAAPAPPTSTQDSVHLHNSWVLNSNIPLETRHFLFKHGSGSSAIFSAASQNYPLTSNTVYSPPPRPLPRSTFSRPAFTFNKPYRCCNWKCTALSATAITVTLALLLAYVIAVHLFGLTWQLQPVEGELYANGVSKGNRGTESMDTTYSPIGGKVSDKSEKKVFQKGRAIDTGEVDIGAQVMQTIPPGLFWRFQITIHHPIYLKFNISLAKDSLLGIYGRRNIPPTHTQFDFVKLMDGKQLVKQDSKGSDDTQHSPRNLILTSLQETGFIEYMDQGPWYLAFYNDGKKMEQVFVLTTAIEIMDDCSTNCNGNGECISGHCHCFPGFLGPDCARDSCPVLCGGNGEYEKGHCVCRHGWKGPECDVPEEQCIDPTCFGHGTCIMGVCICVPGYKGEICEEEDCLDPMCSNHGICVKGECHCSTGWGGVNCETPLPVCQEQCSGHGTFLLDAGVCSCDPKWTGSDCSTELCTMECGSHGVCSRGICQCEEGWVGPTCEERSCHSHCTEHGQCKDGKCECSPGWEGDHCTIAHYLDAVRDGCPGLCFGNGRCTLDQNGWHCVCQVGWSGTGCNVVMEMLCGDNLDNDGDGLTDCVDPDCCQQSNCYISPLCQGSPDPLDLIQQSQTLFSQHTSRLFYDRIKFLIGKDSTHVIPPEVSFDSRRACVIRGQVVAIDGTPLVGVNVSFLHHSDYGFTISRQDGSFDLVAIGGISVILIFDRSPFLPEKRTLWLPWNQFIVVEKVTMQRVVSDPPSCDISNFISPNPIVLPSPLTSFGGSCPERGTIVPELQVVQEEIPIPSSFVRLSYLSSRTPGYKTLLRILLTHSTIPVGMIKVHLTVAVEGRLTQKWFPAAINLVYTFAWNKTDIYGQKVWGLAEALVSVGYEYETCPDFILWEQRTVVLQGFEMDASNLGGWSLNKHHILNPQSGIIHKGNGENMFISQQPPVISTIMGNGHQRSVACTNCNGPAHNNKLFAPVALASGPDGSVYVGDFNFVRRIFPSGNSVSILELRNRDTRHSTSPAHKYYLAMDPVSESLYLSDTNTRKVYKLKSLVETKDLSKNFEVVAGTGDQCLPFDQSHCGDGGRASEASLNSPRGITVDRHGFIYFVDGTMIRKIDENAVITTVIGSNGLTSTQPLSCDSGMDITQVRLEWPTDLAVNPMDNSLYVLDNNIVLQISENRRVRIIAGRPIHCQVPGIDHFLVSKVAIHSTLESARAISVSHSGLLFIAETDERKVNRIQQVTTNGEIYIIAGAPTDCDCKIDPNCDCFSGDGGYAKDAKMKAPSSLAVSPDGTLYVADLGNVRIRTISRNQAHLNDMNIYEIASPADQELYQFTVNGTHLHTLNLITRDYVYNFTYNSEGDLGAITSSNGNSVHIRRDAGGMPLWLVVPGGQVYWLTISSNGVLKRVSAQGYNLALMTYPGNTGLLATKSNENGWTTVYEYDPEGHLTNATFPTGEVSSFHSDLEKLTKVELDTSNRENVLMSTNLTATSTIYILKQENTQSTYRVNPDGSLRVTFASGMEIGLSSEPHILAGAVNPTLGKCNISLPGEHNANLIEWRQRKEQNKGNVSAFERRLRAHNRNLLSIDFDHITRTGKIYDDHRKFTLRILYDQTGRPILWSPVSRYNEVNITYSPSGLVTFIQRGTWNEKMEYDQSGKIISRTWADGKIWSYTYLEKSVMLLLHSQRRYIFEYDQPDCLLSVTMPSMVRHSLQTMLSVGYYRNIYTPPDSSTSFIQDYSRDGRLLQTLHLGTGRRVLYKYTKQARLSEVLYDTTQVTLTYEESSGVIKTIHLMHDGFICTIRYRQTGPLIGRQIFRFSEEGLVNARFDYSYNNFRVTSMQAVINETPLPIDLYRYVDVSGRTEQFGKFSVINYDLNQVITTTVMKHTKIFSANGQVIEVQYEILKAIAYWMTIQYDNVGRMVICDIRVGVDANITRYFYEYDADGQLQTVSVNDKTQWRYSYDLNGNINLLSHGKSARLTPLRYDLRDRITRLGEIQYKMDEDGFLRQRGNDIFEYNSNGLLQKAYNKASGWTVQYYYDGLGRRVASKSSLGQHLQFFYADLTNPIRVTHLYNHTSSEITSLYYDLQGHLIAMELSSGEEYYVACDNTGTPLAVFSSRGQVIKEILYTPYGDIYHDTYPDFQVIIGFHGGLYDFLTKLVHLGQRDYDVVAGRWTTPNHHIWKQLNLLPKPFNLYSFENNYPVGKIQDVAKYTTDIRSWLELFGFQLHNVLPGFPKPELENLELTYELLRLQTKTQEWDPGKTILGIQCELQKQLRNFISLDQLPMTPRYNDGRCLEGGKQPRFAAVPSVFGKGIKFAIKDGIVTADIIGVANEDSRRLAAILNNAHYLENLHFTIEGRDTHYFIKLGSLEEDLVLIGNTGGRRILENGVNVTVSQMTSVLNGRTRRFADIQLQHGALCFNIRYGTTVEEEKNHVLEIARQRAVAQAWTKEQRRLQEGEEGIRAWTEGEKQQLLSTGRVQGYDGYFVLSVEQYLELSDSANNIHFMRQSEIGRR

SEQ ID NO: 21389 - protein, 2560 aa, Artificial Sequence
  Synthetic polypeptide
ATQKTADFCISIRDVQSSPHNQFTFRPLPPPPPPPHACTCARKPPPAADSLQRRSMTTRSQPSPAAPAPPTSTQDSVHLHNSWVLNSNIPLETRHFLFKHGSGSSAIFSAASQNYPLTSNTVYSPPPRPLPRSTFSRPAFTFNKPYRCCNWKCTALSATAITVTLALLLAYVIAVHLFGLTWQLQPVEGELYANGVSKGNRGTESMDTTYSPIGGKVSDKSEKKVFQKGRAIDTGEVDIGAQVMQTIPPGLFWRFQITIHHPIYLKFNISLAKDSLLGIYGRRNIPPTHTQFDFVKLMDGKQLVKQDSKGSDDTQHSPRNLILTSLQETGFIEYMDQGPWYLAFYNDGKKMEQVFVLTTAIEIMDDCSTNCNGNGECISGHCHCFPGFLGPDCARDSCPVLCGGNGEYEKGHCVCRHGWKGPECDVPEEQCIDPTCFGHGTCIMGVCICVPGYKGEICEEEDCLDPMCSNHGICVKGECHCSTGWGGVNCETPLPVCQEQCSGHGTFLLDAGVCSCDPKWTGSDCSTELCTMECGSHGVCSRGICQCEEGWVGPTCEERSCHSHCTEHGQCKDGKCECSPGWEGDHCTIAHYLDAVRDGCPGLCFGNGRCTLDQNGWHCVCQVGWSGTGCNVVMEMLCGDNLDNDGDGLTDCVDPDCCQQSNCYISPLCQGSPDPLDLIQQSQTLFSQHTSRLFYDRIKFLIGKDSTHVIPPEVSFDSRRACVIRGQVVAIDGTPLVGVNVSFLHHSDYGFTISRQDGSFDLVAIGGISVILIFDRSPFLPEKRTLWLPWNQFIVVEKVTMQRVVSDPPSCDISNFISPNPIVLPSPLTSFGGSCPERGTIVPELQVVQEEIPIPSSFVRLSYLSSRTPGYKTLLRILLTHSTIPVGMIKVHLTVAVEGRLTQKWFPAAINLVYTFAWNKTDIYGQKVWGLAEALVSVGYEYETCPDFILWEQRTVVLQGFEMDASNLGGWSLNKHHILNPQSGIIHKGNGENMFISQQPPVISTIMGNGHQRSVACTNCNGPAHNNKLFAPVALASGPDGSVYVGDFNFVRRIFPSGNSVSILELSTSPAHKYYLAMDPVSESLYLSDTNTRKVYKLKSLVETKDLSKNFEVVAGTGDQCLPFDQSHCGDGGRASEASLNSPRGITVDRHGFIYFVDGTMIRKIDENAVITTVIGSNGLTSTQPLSCDSGMDITQVRLEWPTDLAVNPMDNSLYVLDNNIVLQISENRRVRIIAGRPIHCQVPGIDHFLVSKVAIHSTLESARAISVSHSGLLFIAETDERKVNRIQQVTTNGEIYIIAGAPTDCDCKIDPNCDCFSGDGGYAKDAKMKAPSSLAVSPDGTLYVADLGNVRIRTISRNQAHLNDMNIYEIASPADQELYQFTVNGTHLHTLNLITRDYVYNFTYNSEGDLGAITSSNGNSVHIRRDAGGMPLWLVVPGGQVYWLTISSNGVLKRVSAQGYNLALMTYPGNTGLLATKSNENGWTTVYEYDPEGHLTNATFPTGEVSSFHSDLEKLTKVELDTSNRENVLMSTNLTATSTIYILKQENTQSTYRVNPDGSLRVTFASGMEIGLSSEPHILAGAVNPTLGKCNISLPGEHNANLIEWRQRKEQNKGNVSAFERRLRAHNRNLLSIDFDHITRTGKIYDDHRKFTLRILYDQTGRPILWSPVSRYNEVNITYSPSGLVTFIQRGTWNEKMEYDQSGKIISRTWADGKIWSYTYLEKSVMLLLHSQRRYIFEYDQPDCLLSVTMPSMVRHSLQTMLSVGYYRNIYTPPDSSTSFIQDYSRDGRLLQTLHLGTGRRVLYKYTKQARLSEVLYDTTQVTLTYEESSGVIKTIHLMHDGFICTIRYRQTGPLIGRQIFRFSEEGLVNARFDYSYNNFRVTSMQAVINETPLPIDLYRYVDVSGRTEQFGKFSVINYDLNQVITTTVMKHTKIFSANGQVIEVQYEILKAIAYWMTIQYDNVGRMVICDIRVGVDANITRYFYEYDADGQLQTVSVNDKTQWRYSYDLNGNINLLSHGKSARLTPLRYDLRDRITRLGEIQYKMDEDGFLRQRGNDIFEYNSNGLLQKAYNKASGWTVQYYYDGLGRRVASKSSLGQHLQFFYADLTNPIRVTHLYNHTSSEITSLYYDLQGHLIAMELSSGEEYYVACDNTGTPLAVFSSRGQVIKEILYTPYGDIYHDTYPDFQVIIGFHGGLYDFLTKLVHLGQRDYDVVAGRWTTPNHHIWKQLNLLPKPFNLYSFENNYPVGKIQDVAKYTTDIRSWLELFGFQLHNVLPGFPKPELENLELTYELLRLQTKTQEWDPGKTILGIQCELQKQLRNFISLDQLPMTPRYNDGRCLEGGKQPRFAAVPSVFGKGIKFAIKDGIVTADIIGVANEDSRRLAAILNNAHYLENLHFTIEGRDTHYFIKLGSLEEDLVLIGNTGGRRILENGVNVTVSQMTSVLNGRTRRFADIQLQHGALCFNIRYGTTVEEEKNHVLEIARQRAVAQAWTKEQRRLQEGEEGIRAWTEGEKQQLLSTGRVQGYDGYFVLSVEQYLELSDSANNIHFMRQSEIGRR

SEQ ID NO: 21390 - protein, 73 aa, Artificial Sequence
  Synthetic polypeptide
FLHFHQRCAEQPTQPVHLQTPPTATSASSCLHLCQEATPCSGLSSEEINDYPQPAQPSCSSSPNQHAGFSPSA

SEQ ID NO: 21391 - protein, 73 aa, Artificial Sequence
  Synthetic polypeptide
SDKDGRIGTSPVYSSQRERRRRRLISAFPSEMCRAAHTTSSPSDPSHRHLRLLMPAPVPGSHPLQRTLFRGDQ

SEQ ID NO: 21392 - protein, 656 aa, Artificial Sequence
  Synthetic polypeptide
GRARWLTPVIPALWETEPGGSPEYLPVTVVNTTMSLTALRQQMQTQNLSAYIIPGTDAHMNEYIGQHDERRAWITGFTGSAGTAVVTMKKAAVWTDSRYWTQAERQMDCNWELHKEVGTTPIVTWLLTEIPAGGRVGFDPFLLSIDTWESYDLALQGSNRQLVSITTNLVDLVWGSERPPVPNQPIYALQEAFTGSTWQEKVSGVRSQMQKHQKVPTAVLLSALEETAWLFNLRASDIPYNPFFYSYTLLTDSSIRLFANKSRFSSETLSYLNSSCTGPMCVQIEDYSQVRDSIQAYSLGDVRIWIGTSYTMYGIYEMIPKEKLVTDTYSPVMMTKAVKNSKEQALLKASHVRDAVAVIRYLVWLEKNVPKGTVDEFSGAEIVDKFRGEEQFSSGPSFETISASGLNAALAHYSPTKELNRKLSSDEMYLLDSGGQYWDGTTDITRTVHWGTPSAFQKEAYTRVLIGNIDLSRLIFPAATSGRMVEAFARRALWDAGLNYGHGTGHGIGNFLCVHEWPVGFQSNNIAMAKGMFTSIEPGYYKDGEFGIRLEDVALVVEAKTKYPGSYLTFEVVSFVPYDRNLIDVSLLSPEHLQYLNRYYQTIREKVGPELQRRQLLEEFEWLQQHTEPLAARAPDTASWASVLVVSTLAILGWSV

SEQ ID NO: 21393 - protein, 165 aa, Artificial Sequence
  Synthetic polypeptide
GRARWLTPVIPALWETEPGGSPEYLPVTVVNTTMSLTALRQQMQTQNLSAYIIPGTDAHMNEYIGQHDERRAWITGFTGSAGTAVVTMKKAAVWTDSRYWTQAERQMDCNWELHKEVGTTPIVTWLLTEIPAGGRVGFDPFLLSIGMLFLQSLNLSMLTRVTQLP

SEQ ID NO: 21394 - protein, 50 aa, Artificial Sequence
  Synthetic polypeptide
SQHFGRPSQVDHLSTFQLLWSIPQCHSQPSASRCRPRISQPTSSQAQMLT

SEQ ID NO: 21395 - protein, 44 aa, Artificial Sequence
  Synthetic polypeptide
VPSSYCGQYHNVTHSPPPADADPESLSLHHPRHRCSHERVHRPT

SEQ ID NO: 21396 - protein, 16 aa, Artificial Sequence
  Synthetic polypeptide
GKRIASTWETEFTIQR

SEQ ID NO: 21397 - protein, 234 aa, Artificial Sequence
  Synthetic polypeptide
NPNSTKNTKTSRAWRQVPVIPATQEAEARESLQPGRRSSRFNGDEAYDQCTNYLLQEGHTSGCLLDAEQRDDILYFSIRNGTHPVFTASRWMVYYLKPSSPKHVRFSWHQDAVTVTCSDLSYGDLLYEVQYRSPFDTEWQSKQENTCNVTIEGLDAEKCYSFWVRVKAMEDVYGPDTYPSDWSEVTCWQRGEIRDACAETPTPPKPKLSKFILISSLAILLMVSLLLLSLWKLW

SEQ ID NO: 21398 - protein, 235 aa, Artificial Sequence
  Synthetic polypeptide
NPNSTKNTKTSRAWRQVPVIPATQEAEARESLQPGRRSSRFNGDEAYDQCTNYLLQEGHTSGCLLDAEQRDDILYFSIRNGTHPVFTASRWMVYYLKPSSPKHVRFSWHQDAVTVTCSDLSYGDLLYEVQYRSPFDTEWQSKQENTCNVTIEGLDAEKCYSFWVRVKAMEDVYGPDTYPSDWSEVTCWQRGEIRDACAETPTPPKPKLSKFILISSLAILLMVSLLLLSLWKLWR

SEQ ID NO: 21399 - protein, 212 aa, Artificial Sequence
  Synthetic polypeptide
NPNSTKNTKTSRAWRQVPVIPATQEAEARESLQPGRRSSRFNGDEAYDQCTNYLLQEGHTSGCLLDAEQRDDILYFSIRNGTHPVFTASRWMVYYLKPSSPKHVRFSWHQDAVTVTCSDLSYGDLLYEVQYRSPFDTEWQTQSRSVTQAGVQWCDLCLLQPSPPRFKRFSCLSLPSSWDYRHPPPRLANFCIISRDGVSPCWPGWSRTCDLR

SEQ ID NO: 21400 - protein, 45 aa, Artificial Sequence
  Synthetic polypeptide
SQLLRRLRQENRFNLGDGVHDSTVMRPMTSAPTTFSRKVTLRGAS

SEQ ID NO: 21401 - protein, 25 aa, Artificial Sequence
  Synthetic polypeptide
SPFIHGFTLHGVSYLWSTVVQNRLL

SEQ ID NO: 21402 - protein, 111 aa, Artificial Sequence
  Synthetic polypeptide
SSPPLFTVSLSMVSVTCGQQWSKIGCFECCIKCLGGVPYASLVATILCFSGVALFCGCGHVALAGTVAILEQHFSTNASDHALLSEVIQLMQYVIYGIASFFFLYGIILLA

SEQ ID NO: 21403 - protein, 292 aa, Artificial Sequence
  Synthetic polypeptide
SSPPLFTVSLSMVSVTCGQQWSKIGCFECCIKCLGGVPYASLVATILCFSGVALFCGCGHVALAGTVAILEQHFSTNASDHALLSEVIQLMQYVIYGIASFFFLYGIILLAEGFYTTSAVKELHGEFKTTACGRCISGMFVFLTYVLGVAWLGVFGFSAVPVFMFYNIWSTCEVIKSPQTNGTTGVEQICVDIRQYGIIPWNAFPGKICGSALENICNTNEFYMSYHLFIVACAGAGATVIALIHFLMILSSNWAYLKDASKMQAYQDIKAKEEQELQDIQSRSKEQLNSYT

SEQ ID NO: 21404 - protein, 269 aa, Artificial Sequence
  Synthetic polypeptide
SSPPLFTVSLSMVSVTCGQQWSKIGCFECCIKCLGGVPYASLVATILCFSGVALFCGCGHVALAGTVAILEQHFSTNASDHALLSEVIQLMQYVIYGIASFFFLYGIILLAEGFYTTSAVKELHGEFKTTACGRCISGMFVFLTYVLGVAWLGVFGFSAVPVFMFYNIWSTCEVIKSPQTNGTTGVEQICVDIRQYGIIPWNAFPGKICGSALENICNTNEFYMSYHLFIVACAGAGATVIALLIYMMATTYNYAVLKFKSREDCCTKF

SEQ ID NO: 21405 - protein, 36 aa, Artificial Sequence
  Synthetic polypeptide
KVIPYFLRRLNSLLCDFGIPCTSITLVICWANQYLQ

SEQ ID NO: 21406 - protein, 37 aa, Artificial Sequence
  Synthetic polypeptide
LRNTLYFYHSSDLLGESISTVIVLRLLPGLWDLKISC

SEQ ID NO: 21407 - protein, 5 aa, Artificial Sequence
  Synthetic polypeptide
SEQQS

SEQ ID NO: 21408 - protein, 320 aa, Artificial Sequence; identical to SEQ ID NO: 2427
  Synthetic polypeptide

SEQ ID NO: 21409 - protein, 297 aa, Artificial Sequence; identical to SEQ ID NO: 2509
  Synthetic polypeptide

SEQ ID NO: 21410 - protein, 29 aa, Artificial Sequence
  Synthetic polypeptide
EADVAMRTIQPSQQCHRTLQHDALPRTVE

SEQ ID NO: 21411 - protein, 62 aa, Artificial Sequence
  Synthetic polypeptide
EADVAMRTIQPSQQCHRTLQHDALPRTVETAQDLSEAVVPGLSVPAGRPQKEYPAWHGKPTD

SEQ ID NO: 21412 - protein, 77 aa, Artificial Sequence
  Synthetic polypeptide
EADVAMRTIQPSQQCHRTLQHDALPRTVETAQDLSEAVVPGLSVPAGRPQKEYPAWHGKPTGSDDGNLGSVYIYVLL

SEQ ID NO: 21413 - protein, 23 aa, Artificial Sequence
  Synthetic polypeptide
ERFNPPSNVTVRCNTTHCLVRWK

SEQ ID NO: 21414 - protein, 162 aa, Artificial Sequence
  Synthetic polypeptide
ERFNPPSNVTVRCNTTHCLVRWKQPRTYQKLSYLDFQYQLDVHRKNTQPGTENLLINVSGDLENRYNFPSSEPRAKHSVKIRAADVRILNWSSWSEAIEFDHLGGIHPRGRERLPRRGLDREGNYLRPRGCRNGMDISASATRGNCFLDDAVNLYIIFYVFI

SEQ ID NO: 21415 - protein, 185 aa, Artificial Sequence
  Synthetic polypeptide
ERFNPPSNVTVRCNTTHCLVRWKQPRTYQKLSYLDFQYQLDVHRKNTQPGTENLLINVSGDLENRYNFPSSEPRAKHSVKIRAADVRILNWSSWSEAIEFGSDDGNLGSVYIYVLLIVGTLVCGIVLGFLFKRFLRIQRLFPPVPQIKDKLNDNHEVEDEIIWEEFTPEEGKGYREEVLTVKEIT

SEQ ID NO: 21416 - protein, 195 aa, Artificial Sequence
  Synthetic polypeptide
ERFNPPSNVTVRCNTTHCLVRWKQPRTYQKLSYLDFQYQLDVHRKNTQPGTENLLINVSGDLENRYNFPSSEPRAKHSVKIRAADVRILNWSSWSEAIEFGSDDGNLGSVYIYVLLIVGTLVCGIVLGFLFKRFLRIQRLFPPVPQIKDKLNDNHEVEDEMGPQRHHRCGWNLYPTPGPSPGSGSSPRLGSESSL

SEQ ID NO: 21417 - protein, 219 aa, Artificial Sequence
  Synthetic polypeptide
ERFNPPSNVTVRCNTTHCLVRWKQPRTYQKLSYLDFQYQLDVHRKNTQPGTENLLINVSGDLENRYNFPSSEPRAKHSVKIRAADVRILNWSSWSEAIEFGSHSVTQAGVQWHNLGSLQPPSPRLKRFSCLRLPGSDDGNLGSVYIYVLLIVGTLVCGIVLGFLFKRFLRIQRLFPPVPQIKDKLNDNHEVEDEIIWEEFTPEEGKGYREEVLTVKEIT

SEQ ID NO: 21418 - protein, 118 aa, Artificial Sequence
  Synthetic polypeptide
ERFNPPSNVTVRCNTTHCLVRWKQPRTYQKLSYLDFQYQLDVHRKNTQPGTENLLINVSGDLENRYNFPSSEPRAKHSVKIRAADVRILNWSSWSEAIEFGSLGYSGCSRQFHRSKTN

SEQ ID NO: 21419 - protein, 70 aa, Artificial Sequence
  Synthetic polypeptide
ERFNPPSNVTVRCNTTHCLVRWKQPRTYQKLSYLDFQYQLDVHRKNTQPGTENLLVLTTGTSALCTFMCS

SEQ ID NO: 21420 - protein, 66 aa, Artificial Sequence
  Synthetic polypeptide
PTWGNPISTKNTKISRAWWRVPVIPATRKAEENHSNLGGGRCNENDSTLPAMSPYVATRRTASYGG

SEQ ID NO: 21421 - protein, 98 aa, Artificial Sequence
  Synthetic polypeptide
PTWGNPISTKNTKISRAWWRVPVIPATRKAEENHSNLGGGRCNENDSTLPAMSPYVATRRTASYGGNSPGPIRSCRTWTFSTSWTSTERIPSLARKTY

SEQ ID NO: 21422 - protein, 100 aa, Artificial Sequence
  Synthetic polypeptide
PTWGNPISTKNTKISRAWWRVPVIPATRKAEENHSNLGGGRCNENDSTLPAMSPYVATRRTASYGGNSPGPIRSCRTWTFSTSWTSTERIPSLARKTYWF

SEQ ID NO: 21423 - protein, 11 aa, Artificial Sequence
  Synthetic polypeptide
TVISKRATTRT

SEQ ID NO: 21424 - protein, 27 aa, Artificial Sequence
  Synthetic polypeptide
YPRGQQLGHEKPEVRFETGRPQQKRYV

SEQ ID NO: 21425 - protein, 245 aa, Artificial Sequence
  Synthetic polypeptide
IISYLTYSRNLEIGLLPHTLQSHLHIMTRTKGGGYESESAYPNAELVFLEIHNIHVMRESLRKLKEIVYPSIDEARWLSNVDGTHWLEYIRMLLAGAVRIADKIESGKTSVVVHCSDGWDRTAQLTSLAMLMLDSYYRTIKGFETLVEKEWISFGHRFALRVGHGNDNHADADRSPIFLQFVDCVWQMTRQFPSAFEFNELFLITILDHLYSCLFGTFLCNCEQQRFKEAWGAGTQRARGSLRSR

SEQ ID NO: 21426 - protein, 342 aa, Artificial Sequence
  Synthetic polypeptide
IISYLTYSRNLEIGLLPHTLQSHLHIMTRTKGGGYESESAYPNAELVFLEIHNIHVMRESLRKLKEIVYPSIDEARWLSNVDGTHWLEYIRMLLAGAVRIADKIESGKTSVVVHCSDGWDRTAQLTSLAMLMLDSYYRTIKGFETLVEKEWISFGHRFALRVGHGNDNHADADRSPIFLQFVDCVWQMTRQFPSAFEFNELFLITILDHLYSCLFGTFLCNCEQQRFKEDVYTKTISLWSYINSQLDEFSNPFFVNYENHVLYPVASLSHLELWVNYYVRWNPRMRPQMPIHQNLKELLAVRAELQKRVEGLQREVATRAVSSSSERGSSPSHSATSVHTSV

SEQ ID NO: 21427 - protein, 23 aa, Artificial Sequence
  Synthetic polypeptide
NWTSASHPAISSPHYDQNKGWRI

SEQ ID NO: 21428 - protein, 36 aa, Artificial Sequence
  Synthetic polypeptide
PEQRVEDMKVKVLTQMQNLCSWRSTTFMSCESHYAN

SEQ ID NO: 21429 - protein, 9 aa, Artificial Sequence
  Synthetic polypeptide
GLVSFSIRV

SEQ ID NO: 21430 - protein, 14 aa, Artificial Sequence
  Synthetic polypeptide
RLSFLQHSSLMSYS

SEQ ID NO: 21431 - protein, 88 aa, Artificial Sequence
  Synthetic polypeptide
KADQGLKRMQPFVSFSYLPMTWKHPTSTPALSCPTFLDQTNAWWQSLAPLPGWPAPWPWPSSVPSPATSPTSRRSSASAFSRVSTQTT

SEQ ID NO: 21432 - protein, 122 aa, Artificial Sequence
  Synthetic polypeptide
SRTQKNATFCLFLLSPYDLEAPHLYPCFELSHLSGPNQCMVAEPGTIAGVASALAMALIGAVSSYISYQQKKFCFSIQQGLNADYVKGENLEAVVCEEPQVKYSTLHTQSAEPPPPPEPARI

SEQ ID NO: 21433 - protein, 67 aa, Artificial Sequence
  Synthetic polypeptide
VVPPFWTKPMHGGRAWHHCRGGQRPGHGPHRCRLQLHLLPAEEVLLQHSAGSQRRLREGREPGSRGM

SEQ ID NO: 21434 - protein, 27 aa, Artificial Sequence
  Synthetic polypeptide
EALPPRITVRMTWEEPCEALSTVLGTR

SEQ ID NO: 21435 - protein, 44 aa, Artificial Sequence
  Synthetic polypeptide
HGRSHVKHSAQSLEQGDGRYGSNDDPGSGGFLNPEAPVGHVKGK

SEQ ID NO: 21436 - protein, 112 aa, Artificial Sequence
  Synthetic polypeptide
HGRSHVKHSAQSLEQGDGRYGSNDDPGSGMVAEPGTIAGVASALAMALIGAVSSYISYQQKKFCFSIQQGLNADYVKGENLEAVVCEEPQVKYSTLHTQSAEPPPPPEPARI

SEQ ID NO: 21437 - protein, 69 aa, Artificial Sequence
  Synthetic polypeptide
STQHSPWNKVMAGTAAMTTLDLAWWQSLAPLPGWPAPWPWPSSVPSPATSPTSRRSSASAFSRVSTQTT

SEQ ID NO: 21438 - protein, 25 aa, Artificial Sequence
  Synthetic polypeptide
STQHSPWNKVMAGTAAMTTLDLVGF

SEQ ID NO: 21439 - protein, 38 aa, Artificial Sequence
  Synthetic polypeptide
EALPPRITVRMTWEEPCEALSTVLGTRAMGPHHHHHNQ

SEQ ID NO: 21440 - protein, 166 aa, Artificial Sequence
  Synthetic polypeptide
HGRSHVKHSAQSLEQEPWDHTTTTTTNRPGTTRAPAKPPGSGLDLADALDDQDDGRRKPGIGGRERWNHVTTTTKRPVTTRAPANTLGNDFDLADALDDRNDRDDGRRKPIAGGGGFSDKDLEDIVGGGEYKPDKGKGDGRYGSNDDPGSGGFLNPEAPVGHVKGK

SEQ ID NO: 21441 - protein, 234 aa, Artificial Sequence
  Synthetic polypeptide
HGRSHVKHSAQSLEQEPWDHTTTTTTNRPGTTRAPAKPPGSGLDLADALDDQDDGRRKPGIGGRERWNHVTTTTKRPVTTRAPANTLGNDFDLADALDDRNDRDDGRRKPIAGGGGFSDKDLEDIVGGGEYKPDKGKGDGRYGSNDDPGSGMVAEPGTIAGVASALAMALIGAVSSYISYQQKKFCFSIQQGLNADYVKGENLEAVVCEEPQVKYSTLHTQSAEPPPPPEPARI

SEQ ID NO: 21442 - protein, 161 aa, Artificial Sequence
  Synthetic polypeptide
HGRSHVKHSAQSLEQEPWDHTTTTTTNRPGTTRAPAKPPGSGLDLADALDDQDDGRRKPGIGGRGDGRYGSNDDPGSGMVAEPGTIAGVASALAMALIGAVSSYISYQQKKFCFSIQQGLNADYVKGENLEAVVCEEPQVKYSTLHTQSAEPPPPPEPARI

SEQ ID NO: 21443 - protein, 54 aa, Artificial Sequence
  Synthetic polypeptide
STQHSPWNKSHGTTPPPPQPIGQEPPELRQNLQVVDWTWLMLWMIKMMAAGNRV

SEQ ID NO: 21444 - protein, 5 aa, Artificial Sequence
  Synthetic polypeptide
LIWGL

SEQ ID NO: 21445 - protein, 52 aa, Artificial Sequence
  Synthetic polypeptide
VSYHEISWFKSVWHFPPHSLSPAPPCEDVPASPLPTTMTDLGTLMILTWRMQ

SEQ ID NO: 21446 - protein, 415 aa, Artificial Sequence
  Synthetic polypeptide
EKPTVVTVEISVNSLGPLSILDMEYTIDIIFSQTWYDERLCYNDTFESLVLNGNVVSQLWIPDTFFRNSKRTHEHEITMPNQMVRIYKDGKVLYTIRMTIDAGCSLHMLRFPMDSHSCPLSFSSFSYPENEMIYKWENFKLEINEKNSWKLFQFDFTGVSNKTEIITTPVGDFMVMTIFFNVSRRFGYVAFQNYVPSSVTTMLSWVSFWIKTESAPARTSLGITSVLTMTTLGTFSRKNFPRVSYITALDFYIAICFVFCFCALLEFAVLNFLIYNQTKAHASPKLRHPRINSRAHARTRARSRACARQHQEAFVCQIVTTEGSDGEERPSCSAQQPPSPGSPEGPRSLCSKLACCEWCKRFKKYFCMVPDCEGSTWQQGRLCIHVYRLDNYSRVVFPVTFFFFNVLYWLVCLNL

SEQ ID NO: 21447 - protein, 274 aa, Artificial Sequence
  Synthetic polypeptide
EKPTVVTVEISVNSLGPLSILDMEYTIDIIFSQTWYDERLCYNDTFESLVLNGNVVSQLWIPDTFFRNSKRTHEHEITMPNQMVRIYKDGKVLYTIRMTIDAGCSLHMLRFPMDSHSCPLSFSSFSYPENEMIYKWENFKLEINEKNSWKLFQFDFTGVSNKTEIITTPVGDFMVMTIFFNVSRRFGYVAFQNYVPSSVTTMLSWVSFWIKTESAPARTSLGITSVLTMTTLGTFSRKNFPRVSYITALDFYIAICFVFCFCALLEFAVLNFLM

SEQ ID NO: 21448 - protein, 8 aa, Artificial Sequence
  Synthetic polypeptide
REAHCGHC

SEQ ID NO: 21449 - protein, 1 aa, Artificial Sequence
  Synthetic polypeptide
G

SEQ ID NO: 21450 - protein, 335 aa, Artificial Sequence
  Synthetic polypeptide
MLFPQVSTRLILSSASDCCSNVTYSVRLTIHAECPMHLEDFPMDVHACPLKFGSYAYTTAEVVYSWTLGKNKSVEVAQDGSRLNQYDLLGHVVGTEIIRSSTGEYVVMTTHFHLKRKIGYFVIQTYLPCIMTVILSQVSFWLNRESVPARTVFGVTTVLTMTTLSISARNSLPKVAYATAMDWFIAVCYAFVFSALIEFATVNYFTKRSWAWEGKKVPEALEMKKKTPAAPAKKTSTTFNIVGTTYPINLAKDTEFSTISKGAAPSASSTPTIIASPKATYVQDSPTETKTYNSVSKVDKISRIIFPVLFAIFNLVYWATYVNRESAIKGMIRKQ

SEQ ID NO: 21451 - protein, 57 aa, Artificial Sequence
  Synthetic polypeptide
PSCYFLSTLGTLLPQGLCTATPSNLNALSPGFYKAHSLICFRLLLKCHLLSEVNNSC

SEQ ID NO: 21452 - protein, 14 aa, Artificial Sequence
  Synthetic polypeptide
FLQNLESSCCIASI

SEQ ID NO: 21453 - protein, 30 aa, Artificial Sequence
  Synthetic polypeptide
FLQNLESSCCIASIEYCDRGHVHQRVSCPR

SEQ ID NO: 21454 - protein, 6 aa, Artificial Sequence
  Synthetic polypeptide
LLYRIH

SEQ ID NO: 21455 - protein, 25 aa, Artificial Sequence
  Synthetic polypeptide
TKFGAHFSLPDFSKIWKVVAVSHPL

SEQ ID NO: 21456 - protein, 116 aa, Artificial Sequence
  Synthetic polypeptide
TKFGAHFSLPDFSKIWKVVAVSHPLNTVTEDMYTNGSPAPGSPAQVKGQEGITLKLNEKQSCTVARILHGGMIHRQGSLHVGDEILEINGTNVTNHSVDQLQKAMKETKGMISLKV

SEQ ID NO: 21457 - protein, 431 aa, Artificial Sequence
  Synthetic polypeptide
TKFGAHFSLPDFSKIWKVVAVSHPLNTVTEDMYTNGSPAPGSPAQVKGQEVRKVRLIQFEKVTEEPMGITLKLNEKQSCTVARILHGGMIHRQGSLHVGDEILEINGTNVTNHSVDQLQKAMKETKGMISLKVIPNQQSRLPALQEAGLKFATGDIIQIINKDDSNWWQGRVEGSSKESAGLIPSPELQEWRVASMAQSAPSEAPSCSPFGKKKKYKDKYLAKHSSIFDQLDVVSYEEVVRLPAFKRKTLVLIGASGVGRSHIKNALLSQNPEKFVYPVPYTTRPPRKSEEDGKEYHFISTEEMTRNISANEFLEFGSYQGNMFGTKFETVHQIHKQNKIAILDIEPQTLKIVRTAELSPFIVFIAPTDQGTQTEALQQLQKDSEAIRSQYAHYFDLSLVNNGVDETLKKLQEAFDQACSSPQWVPVSWVY

SEQ ID NO: 21458 - protein, 451 aa, Artificial Sequence
  Synthetic polypeptide
TKFGAHFSLPDFSKIWKVVAVSHPLNTVTEDMYTNGSPAPGSPAQVKGQEVRKVRLIQFEKVTEEPMGITLKLNEKQSCTVARILHGGMIHRQGSLHVGDEILEINGTNVTNHSVDQLQKAMKETKGMISLKVIPNQQSRLPALQMFMRAQFDYDPKKDNLIPCKEAGLKFATGDIIQIINKDDSNWWQGRVEGSSKESAGLIPSPELQEWRVASMAQSAPSEAPSCSPFGKKKKYKDKYLAKHSSIFDQLDVVSYEEVVRLPAFKRKTLVLIGASGVGRSHIKNALLSQNPEKFVYPVPYTTRPPRKSEEDGKEYHFISTEEMTRNISANEFLEFGSYQGNMFGTKFETVHQIHKQNKIAILDIEPQTLKIVRTAELSPFIVFIAPTDQGTQTEALQQLQKDSEAIRSQYAHYFDLSLVNNGVDETLKKLQEAFDQACSSPQWVPVSWVY

SEQ ID NO: 21459 - protein, 10 aa, Artificial Sequence
  Synthetic polypeptide
DPLLGCIASI

SEQ ID NO: 21460 - protein, 26 aa, Artificial Sequence
  Synthetic polypeptide
DPLLGCIASIEYCDRGHVHQRVSCPR

SEQ ID NO: 21461 - protein, 16 aa, Artificial Sequence
  Synthetic polypeptide
RAVFSLRPTPRLYRIH

SEQ ID NO: 21462 - protein, 248 aa, Artificial Sequence
  Synthetic polypeptide
HDPSFVFKKKCTCIYTKKKAQGRKICSKYLENIDNWSFVDADGITGAENAFKVRLSIRTALGDKAYAWDTNEEYLFKAMVAFSMRKVPNREATEISHVLLCNVTQRVSFWFVVTDPSKNHTLPAVEVQSAIRMNKNRINNAFFLNDQTLEFLKIPSTLAPPMDPSVPIWIIIFGVIFCIIIVAIALLILSGIWQRRRKNKEPSEVDDAEDKCENMITIENGIPSDPLDMKGGHINDAFMTEDERLTPL

SEQ ID NO: 21463 - protein, 22 aa, Artificial Sequence
  Synthetic polypeptide
KTLTIGHSLTLMELQVQKMLLK

SEQ ID NO: 21464 - protein, 9 aa, Artificial Sequence
  Synthetic polypeptide
WNYRCRKCF

SEQ ID NO: 21465 - protein, 267 aa, Artificial Sequence; identical to SEQ ID NO: 2603
  Synthetic polypeptide

SEQ ID NO: 21466 - protein, 24 aa, Artificial Sequence
  Synthetic polypeptide
WISPLLKLNTKPLSGQWISRPLMP

SEQ ID NO: 21467 - protein, 52 aa, Artificial Sequence
  Synthetic polypeptide
LQRTQLKPHKTIQSHCPANGYPGLSCPDEDLPQSRLYLDHLHAAGHSRGRVF

SEQ ID NO: 21468 - protein, 45 aa, Artificial Sequence
  Synthetic polypeptide
MSLEEVLESYDETTAPALIAEDPAKAPQNDTKPLSGQWISRPLMP

SEQ ID NO: 21469 - protein, 251 aa, Artificial Sequence
  Synthetic polypeptide
SPTKRYKAIVRPMDIQASHALMKICLKAAFIWIISMLLAIPEAVFSDLHPFHEESTNQTFISCAPYPHSNELHPKIHSMASFLVFYVIPLSIISVYYYFIAKNLIQSAYNLPVEGNIHVKKQIESRKRLAKTVLVFVGLFAFCWLPNHVIYLYRSYHYSEVDTSMLHFVTSICARLLAFTNSCVNPFALYLLSKSFRKQFNTQLLCCQPGLIIRSHSTGRSTTCMTSLKSTNPSVATFSLINGNICHERYV

SEQ ID NO: 21470 - protein, 74 aa, Artificial Sequence
  Synthetic polypeptide
EISPFHLALSFARCHIRHPFALPSSSTMIVRPPQPCGNKILIIPVCHHHLLNYLLSVLPPPPMRLKQQASMMLL

SEQ ID NO: 21471 - protein, 69 aa, Artificial Sequence
  Synthetic polypeptide
EISPFHLALSFARCHIRHPFALPSSSTMIVRPPQPCGNKILIIPVCHHHLLNYLLSVLPPPPMVLQMLL

SEQ ID NO: 21472 - protein, 77 aa, Artificial Sequence
  Synthetic polypeptide
EISPFHLALSFARCHIRHPFALPSSSTMIVRPPQPCGNKILIIPVCHHHLLNYLLSVLPPPPMVLQRLKQQASMMLL

SEQ ID NO: 21473 - protein, 53 aa, Artificial Sequence
  Synthetic polypeptide
EISPFHLALSFARCHIRHPFALPSSSTMIVRPPQPCGNKILIIPVCHHHLMLL

SEQ ID NO: 21474 - protein, 61 aa, Artificial Sequence
  Synthetic polypeptide
EISPFHLALSFARCHIRHPFALPSSSTMIVRPPQPCGNKILIIPVCHHHLMRKLGLVQMLL

SEQ ID NO: 21475 - protein, 61 aa, Artificial Sequence
  Synthetic polypeptide
EISPFHLALSFARCHIRHPFALPSSSTMIVRPPQPCGNKILIIPVCHHHLRLKQQASMMLL

SEQ ID NO: 21476 - protein, 10 aa, Artificial Sequence
  Synthetic polypeptide
GLPSHVEIRY

SEQ ID NO: 21477 - protein, 179 aa, Artificial Sequence
  Synthetic polypeptide
GQVRWLTPVIPALWEAKAGQRDFDLADALDDPEPTKKPNSDIYPKPKPPYYPQPENPDSGGNIYPRPKPRPQPQPGNSGNSGGSYFNDVDRDDGRYPPRPRPRPPAGGGGGGYSSYGNSDNTHGGDHHSTYGNPEGNMVAKIVSPIVSVVVVTLLGAAASYFKLNNRRNCFRTHEPENV

SEQ ID NO: 21478 - protein, 178 aa, Artificial Sequence
  Synthetic polypeptide
GQVRWLTPVIPALWEAKAGQRDFDLADALDDPEPTKKPNSDIYPKPKPPYYPQPENPDSGGNIYPRPKPRPQPQPGNSGNSGGYFNDVDRDDGRYPPRPRPRPPAGGGGGGYSSYGNSDNTHGGDHHSTYGNPEGNMVAKIVSPIVSVVVVTLLGAAASYFKLNNRRNCFRTHEPENV

SEQ ID NO: 21479 - protein, 193 aa, Artificial Sequence
  Synthetic polypeptide
GQVRWLTPVIPALWEAKAGQRDFDLADALDDPEPTKKPNSDIYPKPKPPYYPQPENPDSGGNIYPRPKPRPQPQPGNSGNSGGYFNDVDRDDGRYPPRPRPRPPAGGGGGGYSSYGNSDNTHGRGGYRLNSRYGNTYGGDHHSTYGNPEGNMVAKIVSPIVSVVVVTLLGAAASYFKLNNRRNCFRTHEPENV

SEQ ID NO: 21480 - protein, 22 aa, Artificial Sequence
  Synthetic polypeptide
PGAVAHACNPSTLGGQGRSKRL

SEQ ID NO: 21481 - protein, 143 aa, Artificial Sequence
  Synthetic polypeptide
SQHFGRPRQVKETLIWQMPLMTLNPPRSQTQISTQSQNHLTTHSPRIPTAVEISTQGQSHALNPSLAIPATVEVTSMMWTVMTDATRPGPGHGRLQEVAAVATPVMATPTTRTEEGAIDSTLVMEILMVEITIQRMAIQKAIW

SEQ ID NO: 21482 - protein, 128 aa, Artificial Sequence
  Synthetic polypeptide
SQHFGRPRQVKETLIWQMPLMTLNPPRSQTQISTQSQNHLTTHSPRIPTAVEISTQGQSHALNPSLAIPATVEVTSMMWTVMTDATRPGPGHGRLQEVAAVATPVMATPTTRTVEITIQRMAIQKAIW

SEQ ID NO: 21483 - protein, 129 aa, Artificial Sequence
  Synthetic polypeptide
SQHFGRPRQVKETLIWQMPLMTLNPPRSQTQISTQSQNHLTTHSPRIPTAVEISTQGQSHALNPSLAIPATVEVVTSMMWTVMTDATRPGPGHGRLQEVAAVATPVMATPTTRTVEITIQRMAIQKAIW

SEQ ID NO: 21484 - protein, 5 aa, Artificial Sequence
  Synthetic polypeptide
GWMLI

SEQ ID NO: 21485 - protein, 2975 aa, Artificial Sequence
  Synthetic polypeptide
LTGYIVEVIFTLRLDVDITELHSWITRSEAVLQSPEFAIFRKEGNFSDLKEKVNAIEREKAEKFRKLQDASRSAQALVEQMVNEGVNADSIKQASEQLNSRWIEFCQLLSERLNWLEYQNNIIAFYNQLQQLEQMTTTAENWLKIQPTTPSEPTAIKSQLKICKDEVNRLSDLQPQIERLKIQSIALKEKGQGPMFLDADFVAFTNHFKQVFSDVQAREKELQTIFDTLPPMRYQETMSAIRTWVQQSETKLSIPQLSVTDYEIMEQRLGELQALQSSLQEQQSGLYYLSTTVKEMSKKAPSEISRKYQSEFEEIEGRWKKLSSQLVEHCQKLEEQMNKLRKIQNHIQTLKKWMAEVDVFLKEEWPALGDSEILKKQLKQCRLLVSDIQTIQPSLNSVNEGGQKIKNEAEPEFASRLETELKELNTQWDHMCQQVYARKEALKGGLEKTVSLQKDLSEMHEWMTQAEEEYLERDFEYKTPDELQKAVEEMKRAKEEAQQKEAKVKLLTESVNSVIAQAPPVAQEALKKELETLTTNYQWLCTRLNGKCKTLEEVWACWHELLSYLEKANKWLNEVEFKLKTTENIPGGAEEISEVLDSLENLMRHSEDNPNQIRILAQTLTDGGVMDELINEELETFNSRWRELHEEAVRRQKLLEQSIQSAQETEKSLHLIQESLTFIDKQLAAYIADKVDAAQMPQEAQKIQSDLTSHEISLEEMKKHNQGKEAAQRVLSQIDVAQKKLQDVSMKFRLFQKPANFEQRLQESKMILDEVKMHLPALETKSVEQEVVQSQLNHCVNLYKSLSEVKSEVEMVIKTGRQIVQKKQTENPKELDERVTALKLHYNELGAKVTERKQQLEKCLKLSRKMRKEMNVLTEWLAATDMELTKRSAVEGMPSNLDSEVAWGKATQKEIEKQKVHLKSITEVGEALKTVLGKKETLVEDKLSLLNSNWIAVTSRAEEWLNLLLEYQKHMETFDQNVDHITKWIIQADTLLDESEKKKPQQKEDVLKRLKAELNDIRPKVDSTRDQAANLMANRGDHCRKLVEPQISELNHRFAAISHRIKTGKASIPLKELEQFNSDIQKLLEPLEAEIQQGVNLKEEDFNKDMNEDNEGTVKELLQRGDNLQQRITDERKREEIKIKQQLLQTKHNALKDLRSQRRKKALEISHQWYQYKRQADDLLKCLDDIEKKLASLPEPRDERKIKEIDRELQKKKEELNAVRRQAEGLSEDGAAMAVEPTQIQLSKRWREIESKFAQFRRLNFAQIHTVREETMMVMTEDMPLEISYVPSTYLTEITHVSQALLEVEQLLNAPDLCAKDFEDLFKQEESLKNIKDSLQQSSGRIDIIHSKKTAALQSATPVERVKLQEALSQLDFQWEKVNKMYKDRQGRFDRSVEKWRRFHYDIKIFNQWLTEAEQFLRKTQIPENWEHAKYKWYLKELQDGIGQRQTVVRTLNATGEEIIQQSSKTDASILQEKLGSLNLRWQEVCKQLSDRKKRLEEQKNILSEFQRDLNEFVLWLEEADNIASIPLEPGKEQQLKEKLEQVKLLVEELPLRQGILKQLNETGGPVLVSAPISPEEQDKLENKLKQTNLQWIKVSRALPEKQGEIEAQIKDLGQLEKKLEDLEEQLNHLLLWLSPIRNQLEIYNQPNQEGPFDVKETEIAVQAKQPDVEEILSKGQHLYKEKPATQPVKRKLEDLSSEWKAVNRLLQELRAKQPDLAPGLTTIGASPTQTVTLVTQPVVTKETAISKLEMPSSLMLEVPALADFNRAWTELTDWLSLLDQVIKSQRVMVGDLEDINEMIIKQKATMQDLEQRRPQLEELITAAQNLKNKTSNQEARTIITDRIERIQNQWDEVQEHLQNRRQQLNEMLKDSTQWLEAKEEAEQVLGQARAKLESWKEGPYTVDAIQKKITETKQLAKDLRQWQTNVDVANDLALKLLRDYSADDTRKVHMITENINASWRSIHKRVSEREAALEETHRLLQQFPLDLEKFLAWLTEAETTANVLQDATRKERLLEDSKGVKELMKQWQDLQGEIEAHTDVYHNLDENSQKILRSLEGSDDAVLLQRRLDNMNFKWSELRKKSLNIRSHLEASSDQWKRLHLSLQELLVWLQLKDDELSRQAPIGGDFPAVQKQNDVHRAFKRELKTKEPVIMSTLETVRIFLTEQPLEGLEKLYQEPRELPPEERAQNVTRLLRKQAEEVNTEWEKLNLHSADWQRKIDETLERLRELQEATDELDLKLRQAEVIKGSWQPVGDLLIDSLQDHLEKVKALRGEIAPLKENVSHVNDLARQLTTLGIQLSPYNLSTLEDLNTRWKLLQVAVEDRVRQLHEAHRDFGPASQHFLSTSVQGPWERAISPNKVPYYINHETQTTCWDHPKMTELYQSLADLNNVRFSAYRTAMKLRRLQKALCLDLLSLSAACDALDQHNLKQNDQPMDILQIINCLTTIYDRLEQEHNNLVNVPLCVDMCLNWLLNVYDTGRTGRIRVLSFKTGIISLCKAHLEDKYRYLFKQVASSTGFCDQRRLGLLLHDSIQIPRQLGEVASFGGSNIEPSVRSCFQFANNKPEIEAALFLDWMRLEPQSMVWLPVLHRVAAAETAKHQAKCNICKECPIIGFRYRSLKHFNYDICQSCFFSGRVAKGHKMHYPMVEYCTPTTSGEDVRDFAKVLKNKFRTKRYFAKHPRMGYLPVQTVLEGDNMETPVTLINFWPVDSAPASSPQLSHDDTHSRIEHYASRLAEMENSNGSYLNDSISPNESIDDEHLLIQHYCQSLNQDSPLSQPRSPAQILISLESEERGELERILADLEEENRNLQAEYDRLKQQHEHKGLSPLPSPPEMMPTSPQSPRDAELIAEAKLLRQHKGRLEARMQILEDHNKQLESQLHRLRQLLEQPQAEAKVNGTTVSSPSTSLQRSDSSQPMLLRVVGSQTSDSMGEEDLLSPPQDTSTGLEEVMEQLNNSFPSSRGRNTPGKPMREDTM

SEQ ID NO: 21486 - protein, 70 aa, Artificial Sequence
  Synthetic polypeptide
LTGYIVEVIFTLRLDVDITELHSWITRSEAVLQSPEFAIFRKEGNFSDLKEKVNVGYALIFISVLILCCL

SEQ ID NO: 21487 - protein, 26 aa, Artificial Sequence
  Synthetic polypeptide
WKHSSRGWVIAYRIYCRSDFYIEVGC

SEQ ID NO: 21488 - protein, 2991 aa, Artificial Sequence
  Synthetic polypeptide
FLINTFQKEKVIVGSSTFSNSGNIQAEAGLDVDITELHSWITRSEAVLQSPEFAIFRKEGNFSDLKEKVNAIEREKAEKFRKLQDASRSAQALVEQMVNEGVNADSIKQASEQLNSRWIEFCQLLSERLNWLEYQNNIIAFYNQLQQLEQMTTTAENWLKIQPTTPSEPTAIKSQLKICKDEVNRLSDLQPQIERLKIQSIALKEKGQGPMFLDADFVAFTNHFKQVFSDVQAREKELQTIFDTLPPMRYQETMSAIRTWVQQSETKLSIPQLSVTDYEIMEQRLGELQALQSSLQEQQSGLYYLSTTVKEMSKKAPSEISRKYQSEFEEIEGRWKKLSSQLVEHCQKLEEQMNKLRKIQNHIQTLKKWMAEVDVFLKEEWPALGDSEILKKQLKQCRLLVSDIQTIQPSLNSVNEGGQKIKNEAEPEFASRLETELKELNTQWDHMCQQVYARKEALKGGLEKTVSLQKDLSEMHEWMTQAEEEYLERDFEYKTPDELQKAVEEMKRAKEEAQQKEAKVKLLTESVNSVIAQAPPVAQEALKKELETLTTNYQWLCTRLNGKCKTLEEVWACWHELLSYLEKANKWLNEVEFKLKTTENIPGGAEEISEVLDSLENLMRHSEDNPNQIRILAQTLTDGGVMDELINEELETFNSRWRELHEEAVRRQKLLEQSIQSAQETEKSLHLIQESLTFIDKQLAAYIADKVDAAQMPQEAQKIQSDLTSHEISLEEMKKHNQGKEAAQRVLSQIDVAQKKLQDVSMKFRLFQKPANFEQRLQESKMILDEVKMHLPALETKSVEQEVVQSQLNHCVNLYKSLSEVKSEVEMVIKTGRQIVQKKQTENPKELDERVTALKLHYNELGAKVTERKQQLEKCLKLSRKMRKEMNVLTEWLAATDMELTKRSAVEGMPSNLDSEVAWGKATQKEIEKQKVHLKSITEVGEALKTVLGKKETLVEDKLSLLNSNWIAVTSRAEEWLNLLLEYQKHMETFDQNVDHITKWIIQADTLLDESEKKKPQQKEDVLKRLKAELNDIRPKVDSTRDQAANLMANRGDHCRKLVEPQISELNHRFAAISHRIKTGKASIPLKELEQFNSDIQKLLEPLEAEIQQGVNLKEEDFNKDMNEDNEGTVKELLQRGDNLQQRITDERKREEIKIKQQLLQTKHNALKDLRSQRRKKALEISHQWYQYKRQADDLLKCLDDIEKKLASLPEPRDERKIKEIDRELQKKKEELNAVRRQAEGLSEDGAAMAVEPTQIQLSKRWREIESKFAQFRRLNFAQIHTVREETMMVMTEDMPLEISYVPSTYLTEITHVSQALLEVEQLLNAPDLCAKDFEDLFKQEESLKNIKDSLQQSSGRIDIIHSKKTAALQSATPVERVKLQEALSQLDFQWEKVNKMYKDRQGRFDRSVEKWRRFHYDIKIFNQWLTEAEQFLRKTQIPENWEHAKYKWYLKELQDGIGQRQTVVRTLNATGEEIIQQSSKTDASILQEKLGSLNLRWQEVCKQLSDRKKRLEEQKNILSEFQRDLNEFVLWLEEADNIASIPLEPGKEQQLKEKLEQVKLLVEELPLRQGILKQLNETGGPVLVSAPISPEEQDKLENKLKQTNLQWIKVSRALPEKQGEIEAQIKDLGQLEKKLEDLEEQLNHLLLWLSPIRNQLEIYNQPNQEGPFDVKETEIAVQAKQPDVEEILSKGQHLYKEKPATQPVKRKLEDLSSEWKAVNRLLQELRAKQPDLAPGLTTIGASPTQTVTLVTQPVVTKETAISKLEMPSSLMLEVPALADFNRAWTELTDWLSLLDQVIKSQRVMVGDLEDINEMIIKQKATMQDLEQRRPQLEELITAAQNLKNKTSNQEARTIITDRIERIQNQWDEVQEHLQNRRQQLNEMLKDSTQWLEAKEEAEQVLGQARAKLESWKEGPYTVDAIQKKITETKQLAKDLRQWQTNVDVANDLALKLLRDYSADDTRKVHMITENINASWRSIHKRVSEREAALEETHRLLQQFPLDLEKFLAWLTEAETTANVLQDATRKERLLEDSKGVKELMKQWQDLQGEIEAHTDVYHNLDENSQKILRSLEGSDDAVLLQRRLDNMNFKWSELRKKSLNIRSHLEASSDQWKRLHLSLQELLVWLQLKDDELSRQAPIGGDFPAVQKQNDVHRAFKRELKTKEPVIMSTLETVRIFLTEQPLEGLEKLYQEPRELPPEERAQNVTRLLRKQAEEVNTEWEKLNLHSADWQRKIDETLERLRELQEATDELDLKLRQAEVIKGSWQPVGDLLIDSLQDHLEKVKALRGEIAPLKENVSHVNDLARQLTTLGIQLSPYNLSTLEDLNTRWKLLQVAVEDRVRQLHEAHRDFGPASQHFLSTSVQGPWERAISPNKVPYYINHETQTTCWDHPKMTELYQSLADLNNVRFSAYRTAMKLRRLQKALCLDLLSLSAACDALDQHNLKQNDQPMDILQIINCLTTIYDRLEQEHNNLVNVPLCVDMCLNWLLNVYDTGRTGRIRVLSFKTGIISLCKAHLEDKYRYLFKQVASSTGFCDQRRLGLLLHDSIQIPRQLGEVASFGGSNIEPSVRSCFQFANNKPEIEAALFLDWMRLEPQSMVWLPVLHRVAAAETAKHQAKCNICKECPIIGFRYRSLKHFNYDICQSCFFSGRVAKGHKMHYPMVEYCTPTTSGEDVRDFAKVLKNKFRTKRYFAKHPRMGYLPVQTVLEGDNMETPVTLINFWPVDSAPASSPQLSHDDTHSRIEHYASRLAEMENSNGSYLNDSISPNESIDDEHLLIQHYCQSLNQDSPLSQPRSPAQILISLESEERGELERILADLEEENRNLQAEYDRLKQQHEHKGLSPLPSPPEMMPTSPQSPRDAELIAEAKLLRQHKGRLEARMQILEDHNKQLESQLHRLRQLLEQPQAEAKVNGTTVSSPSTSLQRSDSSQPMLLRVVGSQTSDSMGEEDLLSPPQDTSTGLEEVMEQLNNSFPSSRGRNTPGKPMREDTM

SEQ ID NO: 21489 - protein, 86 aa, Artificial Sequence
  Synthetic polypeptide
FLINTFQKEKVIVGSSTFSNSGNIQAEAGLDVDITELHSWITRSEAVLQSPEFAIFRKEGNFSDLKEKVNVGYALIFISVLILCCL

SEQ ID NO: 21490 - protein, 30 aa, Artificial Sequence
  Synthetic polypeptide
ILSKKKRLSWEVVLFQIVETFKQRLGWMLI

SEQ ID NO: 21491 - protein, 11 aa, Artificial Sequence
  Synthetic polypeptide
WKHSSRGWVGC

SEQ ID NO: 21492 - protein, 25 aa, Artificial Sequence
  Synthetic polypeptide
PVSAAQQEFEDNWTGISPFIKWWHG

SEQ ID NO: 21493 - protein, 25 aa, Artificial Sequence
  Synthetic polypeptide
TPKLLNPLVLLNKSSKTTGQESHLS

SEQ ID NO: 21494 - protein, 11 aa, Artificial Sequence
  Synthetic polypeptide
LEPRATERGRL

SEQ ID NO: 21495 - protein, 95 aa, Artificial Sequence
  Synthetic polypeptide
NPVSTKNTKISWNQEPLREEDSDFILTEGDLTLTYGDSTVTANGSSSSHTASTSLEGSRRTKSSSEEVLERDLGMGDQKVSSRGTRLVFPLEDNA

SEQ ID NO: 21496 - protein, 50 aa, Artificial Sequence
  Synthetic polypeptide
PGALAHACNPSILGGRGEWITKSRDRDHPDQHGETLSLLKIQKLAGTKSH

SEQ ID NO: 21497 - protein, 116 aa, Artificial Sequence
  Synthetic polypeptide
GRARWLTPVIPAFWEAEASGSRSQEIETILTNMNQEPLREEDSDFILTEGDLTLTYGDSTVTANGSSSSHTASTSLEGSRRTKSSSEEVLERDLGMGDQKVSSRGTRLVFPLEDNA

SEQ ID NO: 21498 - protein, 42 aa, Artificial Sequence
  Synthetic polypeptide
PGALAHACNPSILGGRGEWITKSRDRDHPDQHEPRATERGRL

SEQ ID NO: 21499 - protein, 635 aa, Artificial Sequence
  Synthetic polypeptide
GYAGECTHSLEMQAEVFRGLIVGVILRYGTPATSGRDKSLSCTQEDRAFSTLLVNVSGKFFEYTLKGEISPGKINSVEQNDMLRKVTFDPEVFFNILLPPIIFHAGYSLKKRHFFRNLGSILAYAFLGTAVSCFIIGNLMYGVVKLMKIMGQLSDKFYYTDCLFFGAIISATDPVTVLAIFNELHADVDLYALLFGESVLNDAVAIVLSSSIVAYQPAGLNTHAFDAAAFFKSVGIFLGIFSGSFTMGAVTGVNANVTKFTKLHCFPLLETALFFLMSWSTFLLAEACGFTGVVAVLFCGITQAHYTYNNLSVESRSRTKQLFEVLHFLAENFIFSYMGLALFTFQKHVFSPIFIIGAFVAIFLGRAAHIYPLSFFLNLGRRHKIGWNFQHMMMFSGLRGAMAFALAIRDTASYARQMMFTTTLLIVFFTVWIIGGGTTPMLSWLNIRVGVEEPSEEDQNEHHWQYFRVGVDPDQDPPPNNDSFQVLQGDGPDSARGNRTKQESAWIFRLWYSFDHNYLKPILTHSGPPLTTTLPAWCGLLARCLTSPQVYDNQEPLREEDSDFILTEGDLTLTYGDSTVTANGSSSSHTASTSLEGSRRTKSSSEEVLERDLGMGDQKVSSRGTRLVFPLEDNA

SEQ ID NO: 21500 - protein, 48 aa, Artificial Sequence
  Synthetic polypeptide
GYLNVDWVLDDIKELLLFFVGVIIEVMQENVLILWRCKLKYSGGSSLG

SEQ ID NO: 21501 - protein, 21 aa, Artificial Sequence
  Synthetic polypeptide
SIQGAHRWGDPEVWYPCYQWP

SEQ ID NO: 21502 - protein, 26 aa, Artificial Sequence
  Synthetic polypeptide
PWVPWITEAFSRGVLVASRTAPVMKT

SEQ ID NO: 21503 - protein, 834 aa, Artificial Sequence
  Synthetic polypeptide
QANWSQAACVQILSLLQTNGMTLGAMDNRGFQQGSFSSFQNSSSDEDLMDIPATAMDFSMRDDVPPLDREVGEDKSYNGGGIGSSNRIMDFLEEPIPGVGTYDDFNTIDWVREKSRDRDRHREITNKSKESTWALIHSVSDAFSGWLLMLLIGLLSGSLAGLIDISAHWMTDLKEGICTGGFWFNHEHCCWNSEHVTFEERDKCPEWNSWSQLIISTDEGAFAYIVNYFMYVLWALLFAFLAVSLVKVFAPYACGSGIPEIKTILSGFIIRGYLGKWTLVIKTITLVLAVSSGLSLGKEGPLVHVACCCGNILCHCFNKYRKNEAKRREVLSAAAAAGVSVAFGAPIGGVLFSLEEVSYYFPLKTLWRSFFAALVAAFTLRSINPFGNSRLVLFYVEFHTPWHLFELVPFILLGIFGGLWGALFIRTNIAWCRKRKTTQLGKYPVIEVLVVTAITAILAFPNEYTRMSTSELISELFNDCGLLDSSKLCDYENRFNTSKGGELPDRPAGVGVYSAMWQLALTLILKIVITIFTFGMKIPSGLFIPSMAVGAIAGRLLGVGMEQLAYYHQEWTVFNSWCSQGADCITPGLYAMVGAAACLGGVTRMTVSLVVIMFELTGGLEYIVPLMAAAMTSKWVADALGREGIYDAHIRLNGYPFLEAKEEFAHKTLAMDVMKPRRNDPLLTVLTQDSMTVEDVETIISETTYSGFPVVVSRESQRLVGFVLRRDLIISIENARKKQDGVVSTSIIYFTEHSPPLPPYTPPTLKLRNILDLSPFTVTDLTPMEIVVDIFRKLGLRQCLVTHNGRLLGIITKKDVLKHIAQMANQDPDSILFN

SEQ ID NO: 21504 - protein, 82 aa, Artificial Sequence
  Synthetic polypeptide
QANWSQAACVQILSLLQTNGMTLGAMDNRGFQQGSFSSFQNSSSDEDLMDIPATAMDFSMRDDVPPLDREVGGIIIGDDNLS

SEQ ID NO: 21505 - protein, 27 aa, Artificial Sequence
  Synthetic polypeptide
TGKLESSCLRSDFISVANQRYDLGCHG

SEQ ID NO: 21506 - protein, 820 aa, Artificial Sequence
  Synthetic polypeptide
RRQNKVVSTGAMDNRGFQQGSFSSFQNSSSDEDLMDIPATAMDFSMRDDVPPLDREVGEDKSYNGGGIGSSNRIMDFLEEPIPGVGTYDDFNTIDWVREKSRDRDRHREITNKSKESTWALIHSVSDAFSGWLLMLLIGLLSGSLAGLIDISAHWMTDLKEGICTGGFWFNHEHCCWNSEHVTFEERDKCPEWNSWSQLIISTDEGAFAYIVNYFMYVLWALLFAFLAVSLVKVFAPYACGSGIPEIKTILSGFIIRGYLGKWTLVIKTITLVLAVSSGLSLGKEGPLVHVACCCGNILCHCFNKYRKNEAKRREVLSAAAAAGVSVAFGAPIGGVLFSLEEVSYYFPLKTLWRSFFAALVAAFTLRSINPFGNSRLVLFYVEFHTPWHLFELVPFILLGIFGGLWGALFIRTNIAWCRKRKTTQLGKYPVIEVLVVTAITAILAFPNEYTRMSTSELISELFNDCGLLDSSKLCDYENRFNTSKGGELPDRPAGVGVYSAMWQLALTLILKIVITIFTFGMKIPSGLFIPSMAVGAIAGRLLGVGMEQLAYYHQEWTVFNSWCSQGADCITPGLYAMVGAAACLGGVTRMTVSLVVIMFELTGGLEYIVPLMAAAMTSKWVADALGREGIYDAHIRLNGYPFLEAKEEFAHKTLAMDVMKPRRNDPLLTVLTQDSMTVEDVETIISETTYSGFPVVVSRESQRLVGFVLRRDLIISIENARKKQDGVVSTSIIYFTEHSPPLPPYTPPTLKLRNILDLSPFTVTDLTPMEIVVDIFRKLGLRQCLVTHNGRLLGIITKKDVLKHIAQMANQDPDSILFN

SEQ ID NO: 21507 - protein, 68 aa, Artificial Sequence
  Synthetic polypeptide
RRQNKVVSTGAMDNRGFQQGSFSSFQNSSSDEDLMDIPATAMDFSMRDDVPPLDREVGGIIIGDDNLS

SEQ ID NO: 21508 - protein, 8 aa, Artificial Sequence
  Synthetic polypeptide
SSEYRCHG

SEQ ID NO: 21509 - protein, 26 aa, Artificial Sequence
  Synthetic polypeptide
VQVPWITEAFSRGVLVASRTAPVMKT

SEQ ID NO: 21510 - protein, 18 aa, Artificial Sequence
  Synthetic polypeptide
DWTWWGDSDDCFSCCHNV

SEQ ID NO: 21511 - protein, 5 aa, Artificial Sequence
  Synthetic polypeptide
MDMVG

SEQ ID NO: 21512 - protein, 238 aa, Artificial Sequence
  Synthetic polypeptide
TGHGGVTRMTVSLVVIMFELTGGLEYIVPLMAAAMTSKWVADALGREGIYDAHIRLNGYPFLEAKEEFAHKTLAMDVMKPRRNDPLLTVLTQDSMTVEDVETIISETTYSGFPVVVSRESQRLVGFVLRRDLIISIENARKKQDGVVSTSIIYFTEHSPPLPPYTPPTLKLRNILDLSPFTVTDLTPMEIVVDIFRKLGLRQCLVTHNGRLLGIITKKDVLKHIAQMANQDPDSILFN

SEQ ID NO: 21513 - protein, 37 aa, Artificial Sequence
  Synthetic polypeptide
LLNLGLRSLHKYQCACDHHGCRAGVCHPAQHHREAAI

SEQ ID NO: 21514 - protein, 8 aa, Artificial Sequence
  Synthetic polypeptide
PPQVSVCV

SEQ ID NO: 21515 - protein, 590 aa, Artificial Sequence
  Synthetic polypeptide
PSLDASSLILDFVASTSISVRVTTMDAELEFAIQPNTTGKQLFDQVVKTIGLREVWFFGLQYQDTKGFSTWLKLNKKVTAQDVRKESPLLFKFRAKFYPEDVSEELIQDITQRLFFLQVKEGILNDDIYCPPETAVLLASYAVQSKYGDFNKEVHKSGYLAGDKLLPQRVLEQHKLNKDQWEERIQVWHEEHRGMLREDAVLEYLKIAQDLEMYGVNYFSIKNKKGSELWLGVDALGLNIYEQNDRLTPKIGFPWSEIRNISFNDKKFVIKPIDKKAPDFVFYAPRLRINKRILALCMGNHELYMRRRKPDTIEVQQMKAQAREEKHQKQMERAMLENEKKKREMAEKEKEKIEREKEELMERLKQIEEQTKKAQQELEEQTRRALELEQERKRAQSEAEKLAKERQEAEEAKEALLQASRDQKKTQEQLALEMAELTARISQLEMARQKKESEAVEWQQKAQMVQEDLEKTRAELKTAMSTPHVAEPAENEQDEQDENGAEASADLRADAMAKDRSEEERTTEAEKNERVQKHLKALTSELANARDESKKTANDMIHAENMRLGRDKYKTLRQIRQGNTKQRIDEFESM

SEQ ID NO: 21516 - protein, 591 aa, Artificial Sequence
  Synthetic polypeptide
AWGGVQKSGLFDQCQILMISVRVTTMDAELEFAIQPNTTGKQLFDQVVKTIGLREVWFFGLQYQDTKGFSTWLKLNKKVTAQDVRKESPLLFKFRAKFYPEDVSEELIQDITQRLFFLQVKEGILNDDIYCPPETAVLLASYAVQSKYGDFNKEVHKSGYLAGDKLLPQRVLEQHKLNKDQWEERIQVWHEEHRGMLREDAVLEYLKIAQDLEMYGVNYFSIKNKKGSELWLGVDALGLNIYEQNDRLTPKIGFPWSEIRNISFNDKKFVIKPIDKKAPDFVFYAPRLRINKRILALCMGNHELYMRRRKPDTIEVQQMKAQAREEKHQKQMERAMLENEKKKREMAEKEKEKIEREKEELMERLKQIEEQTKKAQQELEEQTRRALELEQERKRAQSEAEKLAKERQEAEEAKEALLQASRDQKKTQEQLALEMAELTARISQLEMARQKKESEAVEWQQKAQMVQEDLEKTRAELKTAMSTPHVAEPAENEQDEQDENGAEASADLRADAMAKDRSEEERTTEAEKNERVQKHLKALTSELANARDESKKTANDMIHAENMRLGRDKYKTLRQIRQGNTKQRIDEFESM

SEQ ID NO: 21517 - protein, 32 aa, Artificial Sequence
  Synthetic polypeptide
PVPNSYDQCACDHHGCRAGVCHPAQHHREAAI

SEQ ID NO: 21518 - protein, 119 aa, Artificial Sequence
  Synthetic polypeptide
DVPFTFHHDCEASPATWNCPVKNKKKGKKAGPPGPNGPPGPPGPPGPQGPPGIPGIPGIPGTTVMGPPGPPGPPGPQGPPGLQGPSGAADKAGTRENQPAVVHLQGQGSAIQVKNDLSG

SEQ ID NO: 21519 - protein, 242 aa, Artificial Sequence
  Synthetic polypeptide
DVPFTFHHDCEASPATWNCPVKNKKKGKKAGPPGPNGPPGPPGPPGPQGPPGIPGIPGIPGTTVMGPPGPPGPPGPQGPPGLQGPSGAADKAGTRENQPAVVHLQGQGSAIQVKNDLSGGVLNDWSRITMNPKVFKLHPRSGELEVLVDGTYFIYSQVEVYYINFTDFASYEVVVDEKPFLQCTRSIETGKTNYNTCYTAGVCLLKARQKIAVKMVHADISINMSKHTTFFGAIRLGEAPAS

SEQ ID NO: 21520 - protein, 240 aa, Artificial Sequence
  Synthetic polypeptide
DVPFTFHHDCEASPATWNCPVKNKKKGKKAGPPGPNGPPGPPGPPGPQGPPGIPGIPGIPGTTVMGPPGPPGPPGPQGPPGLQGPSGAADKAGTRENQPAVVHLQGQGSAIQVKNDLSGGVLNDWSRITMNPKVFKLHPRSGELEVLVDGTYFIYSQVYYINFTDFASYEVVVDEKPFLQCTRSIETGKTNYNTCYTAGVCLLKARQKIAVKMVHADISINMSKHTTFFGAIRLGEAPAS

SEQ ID NO: 21521 - protein, 237 aa, Artificial Sequence
  Synthetic polypeptide
DVPFTFHHDCEASPATWNCPVKNKKKGKKAGPPGPNGPPGPPGPPGPQGPPGIPGIPGIPGTTVMGPPGPPGPPGPQGPPGLQGPSGAADKAGTRENQPAVVHLQGQGSAIQVKNGGVLNDWSRITMNPKVFKLHPRSGELEVLVDGTYFIYSQVYYINFTDFASYEVVVDEKPFLQCTRSIETGKTNYNTCYTAGVCLLKARQKIAVKMVHADISINMSKHTTFFGAIRLGEAPAS

SEQ ID NO: 21522 - protein, 10 aa, Artificial Sequence
  Synthetic polypeptide
GLPSHVELPS

SEQ ID NO: 21523 - protein, 141 aa, Artificial Sequence
  Synthetic polypeptide
WFDKGKHVLLGSHSFSCLPPCEMCLSPSTMTVRPPQPRGTAQLKTRKRERKQDLLDPMALQDPQDLQDPRDPQEFQGFLEFQEQLLWDHLVLQVLLVLKDPLASRDLLVLLIKLELEKTSQLWCIYRAKGQQFKSRMIFQV

SEQ ID NO: 21524 - protein, 151 aa, Artificial Sequence
  Synthetic polypeptide
WFDKGKHVLLGSHSFSCLPPCEMCLSPSTMTVRPPQPRGTAQLKTRKRERKQDLLDPMALQDPQDLQDPRDPQEFQGFLEFQEQLLWDHLVLQVLLVLKDPLASRDLLVLLIKLELEKTSQLWCIYRAKGQQFKSRMIFQVECSMTGLASL

SEQ ID NO: 21525 - protein, 148 aa, Artificial Sequence
  Synthetic polypeptide
WFDKGKHVLLGSHSFSCLPPCEMCLSPSTMTVRPPQPRGTAQLKTRKRERKQDLLDPMALQDPQDLQDPRDPQEFQGFLEFQEQLLWDHLVLQVLLVLKDPLASRDLLVLLIKLELEKTSQLWCIYRAKGQQFKSRMVECSMTGLASL

SEQ ID NO: 21526 - protein, 411 aa, Artificial Sequence
  Synthetic polypeptide
CKDGGRDWNDVSTSQGAPRIDGSHQKLEERHGTTSSSAPPEGTNPGHTDFGLLGSRTLPLLGVGLNTTILTPNGNEDTTADFFLTTMPTDSLSVSTLPLPEVQCFVFNVEYMNCTWNSSSEPQPTNLTLHYWYKNSDNDKVQKCSHYLFSEEITSGCQLQKKEIHLYQTFVVQLQDPREPRRQATQMLKLQNLVIPWAPENLTLHKLSESQLELNWNNRFLNHCLEHLVQYRTDWDHSWTEQSVDYRHKFSLPSVDGQKRYTFRVRSRFNPLCGSAQHWSEWSHPIHWGSNTSKENPFLFALEAVVISVGSMGLIISLLCVYFWLERTMPRIPTLKNLEDLVTEYHGNFSAWSGVSKGLAESLQPDYSERLCLVSEIPPKGGALGEGPGASPCNQHSPYWAPPCYTLKPET

SEQ ID NO: 21527 - protein, 26 aa, Artificial Sequence
  Synthetic polypeptide
FRTSGLQNSAPAGSGAEHDNSDAQWE

SEQ ID NO: 21528 - protein, 37 aa, Artificial Sequence
  Synthetic polypeptide
KRGMEQLLPQRLQKGPTLATLISDFWAPELCPCWEWG

SEQ ID NO: 21529 - protein, 22 aa, Artificial Sequence
  Synthetic polypeptide
EAKHEFSSNFHQLSCKRETQTG

SEQ ID NO: 21530 - protein, 226 aa, Artificial Sequence
  Synthetic polypeptide
KYKNKVAGCHGASLLSQLLERLNMNSAPTFINFPAKGKPKRGDTYELQVRGFSAEQIARWIADRTDVNIRVIRPPNYAGPLMLGLLLAVIGGLVYLRRSNMEFLFNKTGWAFAALCFVLAMTSGQMWNHIRGPPYAHKNPHTGHVNYIHGSSQAQFVAETHIVLLFNGGVTLGMVLLCEAATSDMDIGKRKIMCVAGIGLVVLFFSWMLSIFRSKYHGYPYSFLMS

SEQ ID NO: 21531 - protein, 15 aa, Artificial Sequence
  Synthetic polypeptide
LDVMAHPCYPSYLRG

SEQ ID NO: 21532 - protein, 12 aa, Artificial Sequence
  Synthetic polypeptide
PSGQIRRSSVFV

SEQ ID NO: 21533 - protein, 90 aa, Artificial Sequence; identical to SEQ ID NO: 3767
  Synthetic polypeptide

SEQ ID NO: 21534 - protein, 186 aa, Artificial Sequence; identical to SEQ ID NO: 2938
  Synthetic polypeptide

SEQ ID NO: 21535 - protein, 239 aa, Artificial Sequence; identical to SEQ ID NO: 2701
  Synthetic polypeptide

SEQ ID NO: 21536 - protein, 51 aa, Artificial Sequence; identical to SEQ ID NO: 5134
  Synthetic polypeptide

SEQ ID NO: 21537 - protein, 123 aa, Artificial Sequence
  Synthetic polypeptide
APSKEYSVAKGTEERNITVEKLVYTNFTRRSGPTLTDKQMPSVGKAAQDHSSTHRVRRHRTHPHSLNYLTAGEPQSCPGRAGAEREPYLEIIDTRRRAPQQTWDPEPRALAHPCMLEDKTRGQ

SEQ ID NO: 21538 - protein, 30 aa, Artificial Sequence
  Synthetic polypeptide
QTSRCPVSGRQPRITAAPTESEGTEPTHIL

SEQ ID NO: 21539 - protein, 725 aa, Artificial Sequence
  Synthetic polypeptide
RNLLCRKLQILYVATVPLRRWSIAPPLPAQCGLPTVSSLQRVQCGKGDRGEEHHSGETGVYQLHQAIRANVDRQADAQCREGSPGSQQHPPSQKAPNPPTFSELSHCRGAPELPREGRGRAGTLPRDYRYSEESTPADLGPRAQSPGSPLHARGQDSWPVSSALLSKRPAPQRPPPPKREPRRYRATDGAPADAPVGVLGRPFPTPSPASLDVYVARLSLSHSPSVFSSAQPQDTPKATVCERGSQHVSGDASRPLPEALLPPKQQHLRLQTATMETSRSPSPQFAPQKLTDKPPLLIQDEDSTRIERVMDNNTTVKMVPIKIVHSESQPEKESRQSLACPAEPPALPHGLEKDQIKTLSTSEQFYSRFCLYTRQGAEPEAPHRAQPAEPQPLGTQVPPEKDRCTSPPGLSYMKAKEKTVEDLKSEELAREIVGKDKSLADILDPSVKIKTTMDLMEGIFPKDEHLLEEAQQRRKLLPKIPSPRSTEERKEEPSVPAAVSLATNSTYYSTSAPKAELLIKMKDLQEQQEHEEDSGSDLDHDLSVKKQELIESISRKLQVLREARESLLEDVQANTVLGAEVEAIVKGVCKPSEFDKFRMFIGDLDKVVNLLLSLSGRLARVENALNNLDDGASPGDRQSLLEKQRVLIQQHEDAKELKENLDRRERIVFDILANYLSEESLADYEHFVKMKSALIIEQRELEDKIHLGEEQLKCLLDSLQPERGK

SEQ ID NO: 21540 - protein, 18 aa, Artificial Sequence
  Synthetic polypeptide
ELHNLPTKKIYKPTYMDQ

SEQ ID NO: 21541 - protein, 64 aa, Artificial Sequence
  Synthetic polypeptide
NFIIFPPKKSTNLPIWISNGEVVDWMDSTGEEVSLWQKMRQYPGSWAEGTLQLRSSMAKQKLGL

SEQ ID NO: 21542 - protein, 29 aa, Artificial Sequence
  Synthetic polypeptide
SSHQKNLQTYLYGSVMGKWWTGWTRLGKK

SEQ ID NO: 21543 - protein, 9 aa, Artificial Sequence
  Synthetic polypeptide
RLLHLESFL

SEQ ID NO: 21544 - protein, 9 aa, Artificial Sequence
  Synthetic polypeptide
TLMNLVQVL

SEQ ID NO: 21545 - protein, 9 aa, Artificial Sequence
  Synthetic polypeptide
ILHSLVTGV

SEQ ID NO: 21546 - protein, 9 aa, Artificial Sequence
  Synthetic polypeptide
FMMEQVGLA

SEQ ID NO: 21547 - protein, 9 aa, Artificial Sequence
  Synthetic polypeptide
AMDGKELSL

SEQ ID NO: 21548 - protein, 9 aa, Artificial Sequence
  Synthetic polypeptide
TLAYGKYYI

SEQ ID NO: 21549 - protein, 9 aa, Artificial Sequence
  Synthetic polypeptide
GLIQLIWLA

SEQ ID NO: 21550 - protein, 9 aa, Artificial Sequence
  Synthetic polypeptide
GMVDGGSNI

SEQ ID NO: 21551 - protein, 9 aa, Artificial Sequence
  Synthetic polypeptide
YLWTTFFPL

SEQ ID NO: 21552 - protein, 9 aa, Artificial Sequence
  Synthetic polypeptide
ALWEAKMII

SEQ ID NO: 21553 - protein, 9 aa, Artificial Sequence
  Synthetic polypeptide
WLSSRVTQL

SEQ ID NO: 21554 - protein, 9 aa, Artificial Sequence
  Synthetic polypeptide
AILPKANTV

SEQ ID NO: 21555 - protein, 9 aa, Artificial Sequence
  Synthetic polypeptide
VLLFEVELV

SEQ ID NO: 21556 - protein, 9 aa, Artificial Sequence
  Synthetic polypeptide
GLDTGLQGM

SEQ ID NO: 21557 - protein, 9 aa, Artificial Sequence
  Synthetic polypeptide
SLLDGTQLF

SEQ ID NO: 21558 - protein, 9 aa, Artificial Sequence
  Synthetic polypeptide
GLPTGYLFV

SEQ ID NO: 21559 - protein, 9 aa, Artificial Sequence
  Synthetic polypeptide
LLDRFGYHV

SEQ ID NO: 21560 - protein, 9 aa, Artificial Sequence
  Synthetic polypeptide
SLLEETQAI

SEQ ID NO: 21561 - protein, 9 aa, Artificial Sequence
  Synthetic polypeptide
MLLVQPAEL

SEQ ID NO: 21562 - protein, 9 aa, Artificial Sequence
  Synthetic polypeptide
GLLNISHTA

SEQ ID NO: 21563 - protein, 9 aa, Artificial Sequence
  Synthetic polypeptide
HLYEPWFPV

SEQ ID NO: 21564 - protein, 9 aa, Artificial Sequence
  Synthetic polypeptide
YLQGLPLPL

SEQ ID NO: 21565 - protein, 9 aa, Artificial Sequence
  Synthetic polypeptide
KAVEGILAV

SEQ ID NO: 21566 - protein, 9 aa, Artificial Sequence
  Synthetic polypeptide
MIYEENNRL

SEQ ID NO: 21567 - protein, 9 aa, Artificial Sequence
  Synthetic polypeptide
YLPYFLKSL

SEQ ID NO: 21568 - protein, 9 aa, Artificial Sequence
  Synthetic polypeptide
GLYSLSSVV

SEQ ID NO: 21569 - protein, 9 aa, Artificial Sequence
  Synthetic polypeptide
LMISRTPEV

SEQ ID NO: 21570 - protein, 9 aa, Artificial Sequence
  Synthetic polypeptide
LLGGPSVFL

SEQ ID NO: 21571 - protein, 9 aa, Artificial Sequence
  Synthetic polypeptide
ILSGYGPCV

SEQ ID NO: 21572 - protein, 9 aa, Artificial Sequence
  Synthetic polypeptide
FLPDLDRPL

SEQ ID NO: 21573 - protein, 9 aa, Artificial Sequence
  Synthetic polypeptide
AMDGKELSL

SEQ ID NO: 21574 - protein, 9 aa, Artificial Sequence
  Synthetic polypeptide
RMDFEDLGL

SEQ ID NO: 21575 - protein, 9 aa, Artificial Sequence
  Synthetic polypeptide
TLIFNPTEI

SEQ ID NO: 21576 - protein, 9 aa, Artificial Sequence
  Synthetic polypeptide
LLPGLLLLL

SEQ ID NO: 21577 - protein, 9 aa, Artificial Sequence
  Synthetic polypeptide
LLLVHQHAV

SEQ ID NO: 21578 - protein, 9 aa, Artificial Sequence
  Synthetic polypeptide
FLDDAPPGT

SEQ ID NO: 21579 - protein, 9 aa, Artificial Sequence
  Synthetic polypeptide
VLIRYVWTL

SEQ ID NO: 21580 - protein, 9 aa, Artificial Sequence
  Synthetic polypeptide
YLCGHLHTL

SEQ ID NO: 21581 - protein, 9 aa, Artificial Sequence
  Synthetic polypeptide
VLSQLTILI

SEQ ID NO: 21582 - protein, 9 aa, Artificial Sequence
  Synthetic polypeptide
TLGGLMPVL

SEQ ID NO: 21583 - protein, 9 aa, Artificial Sequence
  Synthetic polypeptide
FLQGSITFI

SEQ ID NO: 21584 - protein, 9 aa, Artificial Sequence
  Synthetic polypeptide
MLLLYIWQV

SEQ ID NO: 21585 - protein, 9 aa, Artificial Sequence
  Synthetic polypeptide
YLKIMPVHL

SEQ ID NO: 21586 - protein, 9 aa, Artificial Sequence
  Synthetic polypeptide
HTLGGLMPV

SEQ ID NO: 21587 - protein, 9 aa, Artificial Sequence
  Synthetic polypeptide
YIMARVLFV

SEQ ID NO: 21588 - protein, 9 aa, Artificial Sequence
  Synthetic polypeptide
FILRTDHYI

SEQ ID NO: 21589 - protein, 9 aa, Artificial Sequence
  Synthetic polypeptide
IMSSAIAYL

SEQ ID NO: 21590 - protein, 9 aa, Artificial Sequence
  Synthetic polypeptide
FIIGILQLA

SEQ ID NO: 21591 - protein, 9 aa, Artificial Sequence
  Synthetic polypeptide
YLLQEIYGI

SEQ ID NO: 21592 - protein, 9 aa, Artificial Sequence
  Synthetic polypeptide
GVFPVVIQA

SEQ ID NO: 21593 - protein, 9 aa, Artificial Sequence
  Synthetic polypeptide
ALVHLPSQL

SEQ ID NO: 21594 - protein, 9 aa, Artificial Sequence
  Synthetic polypeptide
GLHPAKPQV

SEQ ID NO: 21595 - protein, 9 aa, Artificial Sequence
  Synthetic polypeptide
MLVTWELAL

SEQ ID NO: 21596 - protein, 9 aa, Artificial Sequence
  Synthetic polypeptide
VLLTNTIWL

SEQ ID NO: 21597 - protein, 9 aa, Artificial Sequence
  Synthetic polypeptide
ALVHLPSQL

SEQ ID NO: 21598 - protein, 9 aa, Artificial Sequence
  Synthetic polypeptide
CLIDEMPEA

SEQ ID NO: 21599 - protein, 9 aa, Artificial Sequence
  Synthetic polypeptide
ALMGGFMKT

SEQ ID NO: 21600 - protein, 9 aa, Artificial Sequence
  Synthetic polypeptide
  misc_feature (8)..(8): Xaa can be any naturally occurring amino acid
LLLHLPLXL

SEQ ID NO: 21601 - protein, 9 aa, Artificial Sequence
  Synthetic polypeptide
TLQDKNLGL

SEQ ID NO: 21602 - protein, 9 aa, Artificial Sequence
  Synthetic polypeptide
ILANLPPAL

SEQ ID NO: 21603 - protein, 9 aa, Artificial Sequence
  Synthetic polypeptide
PLWDGMAGL

SEQ ID NO: 21604 - protein, 9 aa, Artificial Sequence
  Synthetic polypeptide
GLDHQTHPL

SEQ ID NO: 21605 - protein, 9 aa, Artificial Sequence
  Synthetic polypeptide
GMFLLPPQL

SEQ ID NO: 21606 - protein, 9 aa, Artificial Sequence
  Synthetic polypeptide
RLADHLSFC

SEQ ID NO: 21607 - protein, 9 aa, Artificial Sequence
  Synthetic polypeptide
RMRDQLPAL

SEQ ID NO: 21608 - protein, 9 aa, Artificial Sequence
  Synthetic polypeptide
GLLHAEVAL

SEQ ID NO: 21609 - protein, 9 aa, Artificial Sequence
  Synthetic polypeptide
SLQNCQVSV

SEQ ID NO: 21610 - protein, 9 aa, Artificial Sequence
  Synthetic polypeptide
VISAFPSEV

SEQ ID NO: 21611 - protein, 9 aa, Artificial Sequence
  Synthetic polypeptide
ALAIAALEL

SEQ ID NO: 21612 - protein, 9 aa, Artificial Sequence
  Synthetic polypeptide
VLDGLDVLL

SEQ ID NO: 21613 - protein, 9 aa, Artificial Sequence
  Synthetic polypeptide
ELFPPLFMA

SEQ ID NO: 21614 - protein, 9 aa, Artificial Sequence
  Synthetic polypeptide
FLIVAEILI

SEQ ID NO: 21615 - protein, 9 aa, Artificial Sequence
  Synthetic polypeptide
IVAEILISL

SEQ ID NO: 21616 - protein, 9 aa, Artificial Sequence
  Synthetic polypeptide
KAVEGILAV

SEQ ID NO: 21617 - protein, 9 aa, Artificial Sequence
  Synthetic polypeptide
YLPHLPQVL

SEQ ID NO: 21618 - protein, 9 aa, Artificial Sequence
  Synthetic polypeptide
MLLDPMGGI

SEQ ID NO: 21619 - protein, 9 aa, Artificial Sequence
  Synthetic polypeptide
RLLHLESFL

SEQ ID NO: 21620 - protein, 9 aa, Artificial Sequence
  Synthetic polypeptide
YLAYILYFV

SEQ ID NO: 21621 - protein, 9 aa, Artificial Sequence
  Synthetic polypeptide
LMTSSIMSV

SEQ ID NO: 21622 - protein, 9 aa, Artificial Sequence
  Synthetic polypeptide
MLMKTVWQA

SEQ ID NO: 21623 - protein, 9 aa, Artificial Sequence
  Synthetic polypeptide
SLQPEDMAL

SEQ ID NO: 21624 - protein, 9 aa, Artificial Sequence
  Synthetic polypeptide
KILTYFPMV

SEQ ID NO: 21625 - protein, 9 aa, Artificial Sequence
  Synthetic polypeptide
FLGTRVTRV

SEQ ID NO: 21626 - protein, 9 aa, Artificial Sequence
  Synthetic polypeptide
SLMQSGSPV

SEQ ID NO: 21627 - protein, 9 aa, Artificial Sequence
  Synthetic polypeptide
VLMWTMAHL

SEQ ID NO: 21628 - protein, 9 aa, Artificial Sequence
  Synthetic polypeptide
LLGETKVYV

SEQ ID NO: 21629 - protein, 9 aa, Artificial Sequence
  Synthetic polypeptide
KILTYFPMV

SEQ ID NO: 21630 - protein, 9 aa, Artificial Sequence
  Synthetic polypeptide
SLLERGLEA

SEQ ID NO: 21631 - protein, 9 aa, Artificial Sequence
  Synthetic polypeptide
VLSSLNVPL

SEQ ID NO: 21632 - protein, 9 aa, Artificial Sequence
  Synthetic polypeptide
FLERKSIRV

SEQ ID NO: 21633 - protein, 9 aa, Artificial Sequence
  Synthetic polypeptide
FVGSSTFYL

SEQ ID NO: 21634 - protein, 9 aa, Artificial Sequence
  Synthetic polypeptide
FLYTGDFFL

SEQ ID NO: 21635 - protein, 9 aa, Artificial Sequence
  Synthetic polypeptide
SVGPFALTV

SEQ ID NO: 21636 - protein, 9 aa, Artificial Sequence
  Synthetic polypeptide
NLALPLPKV

SEQ ID NO: 21637 - protein, 9 aa, Artificial Sequence
  Synthetic polypeptide
VLESGLYQV

SEQ ID NO: 21638 - protein, 9 aa, Artificial Sequence
  Synthetic polypeptide
MLVAITVLI

SEQ ID NO: 21639 - protein, 9 aa, Artificial Sequence
  Synthetic polypeptide
FMDDAKILF

SEQ ID NO: 21640 - protein, 9 aa, Artificial Sequence
  Synthetic polypeptide
ALVHLPSQL

SEQ ID NO: 21641 - protein, 9 aa, Artificial Sequence
  Synthetic polypeptide
ILTASITSI

SEQ ID NO: 21642 - protein, 9 aa, Artificial Sequence
  Synthetic polypeptide
AMDGKELSL

SEQ ID NO: 21643 - protein, 9 aa, Artificial Sequence
  Synthetic polypeptide
SLGWNISGV

SEQ ID NO: 21644 - protein, 9 aa, Artificial Sequence
  Synthetic polypeptide
MISAFPNEV

SEQ ID NO: 21645 - protein, 9 aa, Artificial Sequence
  Synthetic polypeptide
RLTHELPGI

SEQ ID NO: 21646 - protein, 9 aa, Artificial Sequence
  Synthetic polypeptide
LLFSDGEKV

SEQ ID NO: 21647 - protein, 9 aa, Artificial Sequence
  Synthetic polypeptide
RLNESTTFV

SEQ ID NO: 21648 - protein, 9 aa, Artificial Sequence
  Synthetic polypeptide
KLEELKSFV

SEQ ID NO: 21649 - protein, 9 aa, Artificial Sequence
  Synthetic polypeptide
SINEEIQTV

SEQ ID NO: 21650 - protein, 9 aa, Artificial Sequence
  Synthetic polypeptide
RLHDGPLRA

SEQ ID NO: 21651 - protein, 9 aa, Artificial Sequence
  Synthetic polypeptide
MISAFPNEV

SEQ ID NO: 21652 - protein, 9 aa, Artificial Sequence
  Synthetic polypeptide
ILHTSVPFL

SEQ ID NO: 21653 - protein, 9 aa, Artificial Sequence
  Synthetic polypeptide
YLENMVSGV

SEQ ID NO: 21654 - protein, 9 aa, Artificial Sequence
  Synthetic polypeptide
QLLGRLESL

SEQ ID NO: 21655 - protein, 9 aa, Artificial Sequence
  Synthetic polypeptide
RLLHLESFL

SEQ ID NO: 21656 - protein, 9 aa, Artificial Sequence
  Synthetic polypeptide
ALLRQMEGI

SEQ ID NO: 21657 - protein, 9 aa, Artificial Sequence
  Synthetic polypeptide
TLNKDFQEV

SEQ ID NO: 21658 - protein, 9 aa, Artificial Sequence
  Synthetic polypeptide
IMEQGDLSV

SEQ ID NO: 21659 - protein, 9 aa, Artificial Sequence
  Synthetic polypeptide
RLLHLESFL

SEQ ID NO: 21660 - protein, 9 aa, Artificial Sequence
  Synthetic polypeptide
NLVPMVATV

SEQ ID NO: 21661 - protein, 10 aa, Artificial Sequence
  Synthetic polypeptide
ELAGIGILTV

SEQ ID NO: 21662 - protein, 9 aa, Artificial Sequence
  Synthetic polypeptide
RLLHLESFL

SEQ ID NO: 21663 - protein, 9 aa, Artificial Sequence
  Synthetic polypeptide
LLGETKVYV

SEQ ID NO: 21664 - protein, 9 aa, Artificial Sequence
  Synthetic polypeptide
AILPKANTV

SEQ ID NO: 21665 - protein, 9 aa, Artificial Sequence
  Synthetic polypeptide
RLADHLSFC

SEQ ID NO: 21666 - protein, 9 aa, Artificial Sequence
  Synthetic polypeptide
FLIVAEILI

SEQ ID NO: 21667 - protein, 9 aa, Artificial Sequence
  Synthetic polypeptide
YLWTTFFPL

SEQ ID NO: 21668 - protein, 9 aa, Artificial Sequence
  Synthetic polypeptide
FLGTRVTRV

SEQ ID NO: 21669 - protein, 9 aa, Artificial Sequence
  Synthetic polypeptide
RLADHLSFC

SEQ ID NO: 21670 - protein, 9 aa, Artificial Sequence
  Synthetic polypeptide
LLGETKVYV

SEQ ID NO: 21671 - protein, 9 aa, Artificial Sequence
  Synthetic polypeptide
LLGETKVYV

SEQ ID NO: 21672 - protein, 9 aa, Artificial Sequence
  Synthetic polypeptide
MLVTWELAL

SEQ ID NO: 21673 - protein, 9 aa, Artificial Sequence
  Synthetic polypeptide
MLMKTVWQA

SEQ ID NO: 21674 - protein, 9 aa, Artificial Sequence
  Synthetic polypeptide
SLMQSGSPV

SEQ ID NO: 21675 - protein, 9 aa, Artificial Sequence
  Synthetic polypeptide
AILPKANTV

SEQ ID NO: 21676 - protein, 9 aa, Artificial Sequence
  Synthetic polypeptide
AMDGKELSL

SEQ ID NO: 21677 - protein, 9 aa, Artificial Sequence
  Synthetic polypeptide
LLDRFGYHV

SEQ ID NO: 21678 - protein, 9 aa, Artificial Sequence
  Synthetic polypeptide
GLLNISHTA

SEQ ID NO: 21679 - protein, 9 aa, Artificial Sequence
  Synthetic polypeptide
ILTASITSI

SEQ ID NO: 21680 - protein, 9 aa, Artificial Sequence
  Synthetic polypeptide
ILSGYGPCV

SEQ ID NO: 21681 - protein, 9 aa, Artificial Sequence
  Synthetic polypeptide
RQAPGFHHA

SEQ ID NO: 21682 - protein, 9 aa, Artificial Sequence
  Synthetic polypeptide
GLPSHVELA

SEQ ID NO: 21683 - protein, 9 aa, Artificial Sequence
  Synthetic polypeptide
ILHSLVTGV

SEQ ID NO: 21684 - protein, 9 aa, Artificial Sequence
  Synthetic polypeptide
LLHLESFLV

SEQ ID NO: 21685 - protein, 9 aa, Artificial Sequence
  Synthetic polypeptide
VLLTNTIWL

SEQ ID NO: 21686 - protein, 9 aa, Artificial Sequence
  Synthetic polypeptide
LLTSWHLYL

SEQ ID NO: 21687 - protein, 9 aa, Artificial Sequence
  Synthetic polypeptide
RLLHLESFL

SEQ ID NO: 21688 - protein, 9 aa, Artificial Sequence
  Synthetic polypeptide
YLPYFLKSL

SEQ ID NO: 21689 - protein, 9 aa, Artificial Sequence
  Synthetic polypeptide
VLMWTMAHL

SEQ ID NO: 21690 - protein, 9 aa, Artificial Sequence
  Synthetic polypeptide
YLQGLPLPL

SEQ ID NO: 21691 - protein, 9 aa, Artificial Sequence
  Synthetic polypeptide
YLWTTFFPL

SEQ ID NO: 21692 - protein, 9 aa, Artificial Sequence
  Synthetic polypeptide
LLGETKVYV

SEQ ID NO: 21693 - protein, 9 aa, Artificial Sequence
  Synthetic polypeptide
MLVTWELAL

SEQ ID NO: 21694 - protein, 9 aa, Artificial Sequence
  Synthetic polypeptide
MLMKTVWQA

SEQ ID NO: 21695 - protein, 8 aa, Artificial Sequence
  Synthetic polypeptide
RLADHLSF

SEQ ID NO: 21696 - protein, 9 aa, Artificial Sequence
  Synthetic polypeptide
LLDRFGYHV

SEQ ID NO: 21697 - protein, 9 aa, Artificial Sequence
  Synthetic polypeptide
RLADHLSFC

SEQ ID NO: 21698 - protein, 9 aa, Artificial Sequence
  Synthetic polypeptide
GLPSHVELA
